United States Patent Application Publication US 2012/0157512 A1 - sequence listing, part 10

SEQ ID NO: 294012 - DNA, 21 bp, Artificial sequence
  SiRNA target sequence
atatggaaaaatctcagaaat

SEQ ID NO: 294013 - DNA, 21 bp, Artificial sequence
  SiRNA target sequence
tatggaaaaatctcagaaatt

SEQ ID NO: 294014 - DNA, 21 bp, Artificial sequence
  SiRNA target sequence
atggaaaaatctcagaaatta

SEQ ID NO: 294015 - DNA, 21 bp, Artificial sequence
  SiRNA target sequence
tggaaaaatctcagaaattaa

SEQ ID NO: 294016 - DNA, 21 bp, Artificial sequence
  SiRNA target sequence
ggaaaaatctcagaaattaag

SEQ ID NO: 294017 - DNA, 21 bp, Artificial sequence
  SiRNA target sequence
gaaaaatctcagaaattaaga

SEQ ID NO: 294018 - DNA, 21 bp, Artificial sequence
  SiRNA target sequence
aaaaatctcagaaattaagac

SEQ ID NO: 294019 - DNA, 21 bp, Artificial sequence
  SiRNA target sequence
aaaatctcagaaattaagaca

SEQ ID NO: 294020 - DNA, 21 bp, Artificial sequence
  SiRNA target sequence
aaatctcagaaattaagacaa

SEQ ID NO: 294021 - DNA, 21 bp, Artificial sequence
  SiRNA target sequence
aatctcagaaattaagacaaa

SEQ ID NO: 294022 - DNA, 21 bp, Artificial sequence
  SiRNA target sequence
atctcagaaattaagacaaaa

SEQ ID NO: 294023 - DNA, 21 bp, Artificial sequence
  SiRNA target sequence
tctcagaaattaagacaaaac

SEQ ID NO: 294024 - DNA, 21 bp, Artificial sequence
  SiRNA target sequence
ctcagaaattaagacaaaacc

SEQ ID NO: 294025 - DNA, 21 bp, Artificial sequence
  SiRNA target sequence
tcagaaattaagacaaaaccc

SEQ ID NO: 294026 - DNA, 21 bp, Artificial sequence
  SiRNA target sequence
cagaaattaagacaaaacccg

SEQ ID NO: 294027 - DNA, 21 bp, Artificial sequence
  SiRNA target sequence
agaaattaagacaaaacccgc

SEQ ID NO: 294028 - DNA, 21 bp, Artificial sequence
  SiRNA target sequence
gaaattaagacaaaacccgcc

SEQ ID NO: 294029 - DNA, 21 bp, Artificial sequence
  SiRNA target sequence
aaattaagacaaaacccgcca

SEQ ID NO: 294030 - DNA, 21 bp, Artificial sequence
  SiRNA target sequence
aattaagacaaaacccgccat

SEQ ID NO: 294031 - DNA, 21 bp, Artificial sequence
  SiRNA target sequence
attaagacaaaacccgccatc

SEQ ID NO: 294032 - DNA, 21 bp, Artificial sequence
  SiRNA target sequence
ttaagacaaaacccgccatcc

SEQ ID NO: 294033 - DNA, 21 bp, Artificial sequence
  SiRNA target sequence
taagacaaaacccgccatcct

SEQ ID NO: 294034 - DNA, 21 bp, Artificial sequence
  SiRNA target sequence
aagacaaaacccgccatccta

SEQ ID NO: 294035 - DNA, 21 bp, Artificial sequence
  SiRNA target sequence
agacaaaacccgccatcctaa

SEQ ID NO: 294036 - DNA, 21 bp, Artificial sequence
  SiRNA target sequence
gacaaaacccgccatcctaag

SEQ ID NO: 294037 - DNA, 21 bp, Artificial sequence
  SiRNA target sequence
acaaaacccgccatcctaaga

SEQ ID NO: 294038 - DNA, 21 bp, Artificial sequence
  SiRNA target sequence
caaaacccgccatcctaagaa

SEQ ID NO: 294039 - DNA, 21 bp, Artificial sequence
  SiRNA target sequence
aaaacccgccatcctaagaaa

SEQ ID NO: 294040 - DNA, 21 bp, Artificial sequence
  SiRNA target sequence
aaacccgccatcctaagaaat

SEQ ID NO: 294041 - DNA, 21 bp, Artificial sequence
  SiRNA target sequence
aacccgccatcctaagaaatg

SEQ ID NO: 294042 - DNA, 21 bp, Artificial sequence
  SiRNA target sequence
acccgccatcctaagaaatgt

SEQ ID NO: 294043 - DNA, 21 bp, Artificial sequence
  SiRNA target sequence
cccgccatcctaagaaatgtg

SEQ ID NO: 294044 - DNA, 21 bp, Artificial sequence
  SiRNA target sequence
ccgccatcctaagaaatgtga

SEQ ID NO: 294045 - DNA, 21 bp, Artificial sequence
  SiRNA target sequence
cgccatcctaagaaatgtgat

SEQ ID NO: 294046 - DNA, 21 bp, Artificial sequence
  SiRNA target sequence
gccatcctaagaaatgtgata

SEQ ID NO: 294047 - DNA, 21 bp, Artificial sequence
  SiRNA target sequence
ccatcctaagaaatgtgatag

SEQ ID NO: 294048 - DNA, 21 bp, Artificial sequence
  SiRNA target sequence
catcctaagaaatgtgatagt

SEQ ID NO: 294049 - DNA, 21 bp, Artificial sequence
  SiRNA target sequence
atcctaagaaatgtgatagtg

SEQ ID NO: 294050 - DNA, 21 bp, Artificial sequence
  SiRNA target sequence
tcctaagaaatgtgatagtgg

SEQ ID NO: 294051 - DNA, 21 bp, Artificial sequence
  SiRNA target sequence
cctaagaaatgtgatagtgga

SEQ ID NO: 294052 - DNA, 21 bp, Artificial sequence
  SiRNA target sequence
ctaagaaatgtgatagtggat

SEQ ID NO: 294053 - DNA, 21 bp, Artificial sequence
  SiRNA target sequence
taagaaatgtgatagtggatg

SEQ ID NO: 294054 - DNA, 21 bp, Artificial sequence
  SiRNA target sequence
aagaaatgtgatagtggatgg

SEQ ID NO: 294055 - DNA, 21 bp, Artificial sequence
  SiRNA target sequence
agaaatgtgatagtggatgga

SEQ ID NO: 294056 - DNA, 21 bp, Artificial sequence
  SiRNA target sequence
gaaatgtgatagtggatggaa

SEQ ID NO: 294057 - DNA, 21 bp, Artificial sequence
  SiRNA target sequence
aaatgtgatagtggatggaaa

SEQ ID NO: 294058 - DNA, 21 bp, Artificial sequence
  SiRNA target sequence
aatgtgatagtggatggaaaa

SEQ ID NO: 294059 - DNA, 21 bp, Artificial sequence
  SiRNA target sequence
atgtgatagtggatggaaaaa

SEQ ID NO: 294060 - DNA, 21 bp, Artificial sequence
  SiRNA target sequence
tgtgatagtggatggaaaaat

SEQ ID NO: 294061 - DNA, 21 bp, Artificial sequence
  SiRNA target sequence
gtgatagtggatggaaaaatt

SEQ ID NO: 294062 - DNA, 21 bp, Artificial sequence
  SiRNA target sequence
tgatagtggatggaaaaattg

SEQ ID NO: 294063 - DNA, 21 bp, Artificial sequence
  SiRNA target sequence
gatagtggatggaaaaattgt

SEQ ID NO: 294064 - DNA, 21 bp, Artificial sequence
  SiRNA target sequence
atagtggatggaaaaattgtt

SEQ ID NO: 294065 - DNA, 21 bp, Artificial sequence
  SiRNA target sequence
tagtggatggaaaaattgtta

SEQ ID NO: 294066 - DNA, 21 bp, Artificial sequence
  SiRNA target sequence
agtggatggaaaaattgttaa

SEQ ID NO: 294067 - DNA, 21 bp, Artificial sequence
  SiRNA target sequence
gtggatggaaaaattgttaat

SEQ ID NO: 294068 - DNA, 21 bp, Artificial sequence
  SiRNA target sequence
tggatggaaaaattgttaata

SEQ ID NO: 294069 - DNA, 21 bp, Artificial sequence
  SiRNA target sequence
ggatggaaaaattgttaatat

SEQ ID NO: 294070 - DNA, 21 bp, Artificial sequence
  SiRNA target sequence
gatggaaaaattgttaatata

SEQ ID NO: 294071 - DNA, 21 bp, Artificial sequence
  SiRNA target sequence
atggaaaaattgttaatataa

SEQ ID NO: 294072 - DNA, 21 bp, Artificial sequence
  SiRNA target sequence
tggaaaaattgttaatataaa

SEQ ID NO: 294073 - DNA, 21 bp, Artificial sequence
  SiRNA target sequence
ggaaaaattgttaatataaaa

SEQ ID NO: 294074 - DNA, 21 bp, Artificial sequence
  SiRNA target sequence
gaaaaattgttaatataaaac

SEQ ID NO: 294075 - DNA, 21 bp, Artificial sequence
  SiRNA target sequence
aaaaattgttaatataaaaca

SEQ ID NO: 294076 - DNA, 21 bp, Artificial sequence
  SiRNA target sequence
aaaattgttaatataaaacat

SEQ ID NO: 294077 - DNA, 21 bp, Artificial sequence
  SiRNA target sequence
aaattgttaatataaaacata

SEQ ID NO: 294078 - DNA, 21 bp, Artificial sequence
  SiRNA target sequence
aattgttaatataaaacataa

SEQ ID NO: 294079 - DNA, 21 bp, Artificial sequence
  SiRNA target sequence
attgttaatataaaacataaa

SEQ ID NO: 294080 - DNA, 21 bp, Artificial sequence
  SiRNA target sequence
ttgttaatataaaacataaaa

SEQ ID NO: 294081 - DNA, 21 bp, Artificial sequence
  SiRNA target sequence
tgttaatataaaacataaaaa

SEQ ID NO: 294082 - DNA, 21 bp, Artificial sequence
  SiRNA target sequence
gttaatataaaacataaaaac

SEQ ID NO: 294083 - DNA, 21 bp, Artificial sequence
  SiRNA target sequence
ttaatataaaacataaaaact

SEQ ID NO: 294084 - DNA, 21 bp, Artificial sequence
  SiRNA target sequence
taatataaaacataaaaactt

SEQ ID NO: 294085 - DNA, 21 bp, Artificial sequence
  SiRNA target sequence
aatataaaacataaaaacttg

SEQ ID NO: 294086 - DNA, 21 bp, Artificial sequence
  SiRNA target sequence
atataaaacataaaaacttga

SEQ ID NO: 294087 - DNA, 21 bp, Artificial sequence
  SiRNA target sequence
tataaaacataaaaacttgaa

SEQ ID NO: 294088 - DNA, 21 bp, Artificial sequence
  SiRNA target sequence
ataaaacataaaaacttgaag

SEQ ID NO: 294089 - DNA, 21 bp, Artificial sequence
  SiRNA target sequence
taaaacataaaaacttgaaga

SEQ ID NO: 294090 - DNA, 21 bp, Artificial sequence
  SiRNA target sequence
aaaacataaaaacttgaagaa

SEQ ID NO: 294091 - DNA, 21 bp, Artificial sequence
  SiRNA target sequence
aaacataaaaacttgaagaaa

SEQ ID NO: 294092 - DNA, 21 bp, Artificial sequence
  SiRNA target sequence
aacataaaaacttgaagaaat

SEQ ID NO: 294093 - DNA, 21 bp, Artificial sequence
  SiRNA target sequence
acataaaaacttgaagaaatg

SEQ ID NO: 294094 - DNA, 21 bp, Artificial sequence
  SiRNA target sequence
cataaaaacttgaagaaatgc

SEQ ID NO: 294095 - DNA, 21 bp, Artificial sequence
  SiRNA target sequence
ataaaaacttgaagaaatgcg

SEQ ID NO: 294096 - DNA, 21 bp, Artificial sequence
  SiRNA target sequence
taaaaacttgaagaaatgcgc

SEQ ID NO: 294097 - DNA, 21 bp, Artificial sequence
  SiRNA target sequence
aaaaacttgaagaaatgcgcc

SEQ ID NO: 294098 - DNA, 21 bp, Artificial sequence
  SiRNA target sequence
aaaacttgaagaaatgcgcca

SEQ ID NO: 294099 - DNA, 21 bp, Artificial sequence
  SiRNA target sequence
aaacttgaagaaatgcgccat

SEQ ID NO: 294100 - DNA, 21 bp, Artificial sequence
  SiRNA target sequence
aacttgaagaaatgcgccatg

SEQ ID NO: 294101 - DNA, 21 bp, Artificial sequence
  SiRNA target sequence
acttgaagaaatgcgccatgg

SEQ ID NO: 294102 - DNA, 21 bp, Artificial sequence
  SiRNA target sequence
cttgaagaaatgcgccatgga

SEQ ID NO: 294103 - DNA, 21 bp, Artificial sequence
  SiRNA target sequence
ttgaagaaatgcgccatggac

SEQ ID NO: 294104 - DNA, 21 bp, Artificial sequence
  SiRNA target sequence
tgaagaaatgcgccatggaca

SEQ ID NO: 294105 - DNA, 21 bp, Artificial sequence
  SiRNA target sequence
gaagaaatgcgccatggacac

SEQ ID NO: 294106 - DNA, 21 bp, Artificial sequence
  SiRNA target sequence
aagaaatgcgccatggacaca

SEQ ID NO: 294107 - DNA, 21 bp, Artificial sequence
  SiRNA target sequence
agaaatgcgccatggacacac

SEQ ID NO: 294108 - DNA, 21 bp, Artificial sequence
  SiRNA target sequence
gaaatgcgccatggacacacc

SEQ ID NO: 294109 - DNA, 21 bp, Artificial sequence
  SiRNA target sequence
aaatgcgccatggacacaccc

SEQ ID NO: 294110 - DNA, 21 bp, Artificial sequence
  SiRNA target sequence
aatgcgccatggacacaccct

SEQ ID NO: 294111 - DNA, 21 bp, Artificial sequence
  SiRNA target sequence
atgcgccatggacacacccta

SEQ ID NO: 294112 - DNA, 21 bp, Artificial sequence
  SiRNA target sequence
tgcgccatggacacaccctat

SEQ ID NO: 294113 - DNA, 21 bp, Artificial sequence
  SiRNA target sequence
gcgccatggacacaccctatg

SEQ ID NO: 294114 - DNA, 21 bp, Artificial sequence
  SiRNA target sequence
cgccatggacacaccctatgt

SEQ ID NO: 294115 - DNA, 21 bp, Artificial sequence
  SiRNA target sequence
gccatggacacaccctatgtg

SEQ ID NO: 294116 - DNA, 21 bp, Artificial sequence
  SiRNA target sequence
ccatggacacaccctatgtgt

SEQ ID NO: 294117 - DNA, 21 bp, Artificial sequence
  SiRNA target sequence
catggacacaccctatgtgtc

SEQ ID NO: 294118 - DNA, 21 bp, Artificial sequence
  SiRNA target sequence
atggacacaccctatgtgtca

SEQ ID NO: 294119 - DNA, 21 bp, Artificial sequence
  SiRNA target sequence
tggacacaccctatgtgtcaa

SEQ ID NO: 294120 - DNA, 21 bp, Artificial sequence
  SiRNA target sequence
ggacacaccctatgtgtcaaa

SEQ ID NO: 294121 - DNA, 21 bp, Artificial sequence
  SiRNA target sequence
gacacaccctatgtgtcaaaa

SEQ ID NO: 294122 - DNA, 21 bp, Artificial sequence
  SiRNA target sequence
acacaccctatgtgtcaaaag

SEQ ID NO: 294123 - DNA, 21 bp, Artificial sequence
  SiRNA target sequence
cacaccctatgtgtcaaaaga

SEQ ID NO: 294124 - DNA, 21 bp, Artificial sequence
  SiRNA target sequence
acaccctatgtgtcaaaagaa

SEQ ID NO: 294125 - DNA, 21 bp, Artificial sequence
  SiRNA target sequence
caccctatgtgtcaaaagaaa

SEQ ID NO: 294126 - DNA, 21 bp, Artificial sequence
  SiRNA target sequence
accctatgtgtcaaaagaaat

SEQ ID NO: 294127 - DNA, 21 bp, Artificial sequence
  SiRNA target sequence
ccctatgtgtcaaaagaaatg

SEQ ID NO: 294128 - DNA, 21 bp, Artificial sequence
  SiRNA target sequence
cctatgtgtcaaaagaaatga

SEQ ID NO: 294129 - DNA, 21 bp, Artificial sequence
  SiRNA target sequence
ctatgtgtcaaaagaaatgac

SEQ ID NO: 294130 - DNA, 21 bp, Artificial sequence
  SiRNA target sequence
tatgtgtcaaaagaaatgact

SEQ ID NO: 294131 - DNA, 21 bp, Artificial sequence
  SiRNA target sequence
atgtgtcaaaagaaatgactg

SEQ ID NO: 294132 - DNA, 21 bp, Artificial sequence
  SiRNA target sequence
tgtgtcaaaagaaatgactga

SEQ ID NO: 294133 - DNA, 21 bp, Artificial sequence
  SiRNA target sequence
gtgtcaaaagaaatgactgaa

SEQ ID NO: 294134 - DNA, 21 bp, Artificial sequence
  SiRNA target sequence
tgtcaaaagaaatgactgaag

SEQ ID NO: 294135 - DNA, 21 bp, Artificial sequence
  SiRNA target sequence
gtcaaaagaaatgactgaaga

SEQ ID NO: 294136 - DNA, 21 bp, Artificial sequence
  SiRNA target sequence
tcaaaagaaatgactgaagaa

SEQ ID NO: 294137 - DNA, 21 bp, Artificial sequence
  SiRNA target sequence
caaaagaaatgactgaagaag

SEQ ID NO: 294138 - DNA, 21 bp, Artificial sequence
  SiRNA target sequence
aaaagaaatgactgaagaagc

SEQ ID NO: 294139 - DNA, 21 bp, Artificial sequence
  SiRNA target sequence
aaagaaatgactgaagaagct

SEQ ID NO: 294140 - DNA, 21 bp, Artificial sequence
  SiRNA target sequence
aagaaatgactgaagaagctt

SEQ ID NO: 294141 - DNA, 21 bp, Artificial sequence
  SiRNA target sequence
agaaatgactgaagaagcttt

SEQ ID NO: 294142 - DNA, 21 bp, Artificial sequence
  SiRNA target sequence
gaaatgactgaagaagctttt

SEQ ID NO: 294143 - DNA, 21 bp, Artificial sequence
  SiRNA target sequence
aaatgactgaagaagcttttc

SEQ ID NO: 294144 - DNA, 21 bp, Artificial sequence
  SiRNA target sequence
aatgactgaagaagcttttca

SEQ ID NO: 294145 - DNA, 21 bp, Artificial sequence
  SiRNA target sequence
atgactgaagaagcttttcag

SEQ ID NO: 294146 - DNA, 21 bp, Artificial sequence
  SiRNA target sequence
tgactgaagaagcttttcagt

SEQ ID NO: 294147 - DNA, 21 bp, Artificial sequence
  SiRNA target sequence
gactgaagaagcttttcagtt

SEQ ID NO: 294148 - DNA, 21 bp, Artificial sequence
  SiRNA target sequence
actgaagaagcttttcagtta

SEQ ID NO: 294149 - DNA, 21 bp, Artificial sequence
  SiRNA target sequence
ctgaagaagcttttcagttag

SEQ ID NO: 294150 - DNA, 21 bp, Artificial sequence
  SiRNA target sequence
tgaagaagcttttcagttagt

SEQ ID NO: 294151 - DNA, 21 bp, Artificial sequence
  SiRNA target sequence
gaagaagcttttcagttagtt

SEQ ID NO: 294152 - DNA, 21 bp, Artificial sequence
  SiRNA target sequence
aagaagcttttcagttagtta

SEQ ID NO: 294153 - DNA, 21 bp, Artificial sequence
  SiRNA target sequence
agaagcttttcagttagttaa

SEQ ID NO: 294154 - DNA, 21 bp, Artificial sequence
  SiRNA target sequence
gaagcttttcagttagttaaa

SEQ ID NO: 294155 - DNA, 21 bp, Artificial sequence
  SiRNA target sequence
aagcttttcagttagttaaat

SEQ ID NO: 294156 - DNA, 21 bp, Artificial sequence
  SiRNA target sequence
agcttttcagttagttaaatc

SEQ ID NO: 294157 - DNA, 21 bp, Artificial sequence
  SiRNA target sequence
gcttttcagttagttaaatca

SEQ ID NO: 294158 - DNA, 21 bp, Artificial sequence
  SiRNA target sequence
cttttcagttagttaaatcag

SEQ ID NO: 294159 - DNA, 21 bp, Artificial sequence
  SiRNA target sequence
ttttcagttagttaaatcagt

SEQ ID NO: 294160 - DNA, 21 bp, Artificial sequence
  SiRNA target sequence
tttcagttagttaaatcagtc

SEQ ID NO: 294161 - DNA, 21 bp, Artificial sequence
  SiRNA target sequence
ttcagttagttaaatcagtct

SEQ ID NO: 294162 - DNA, 21 bp, Artificial sequence
  SiRNA target sequence
tcagttagttaaatcagtctg

SEQ ID NO: 294163 - DNA, 21 bp, Artificial sequence
  SiRNA target sequence
cagttagttaaatcagtctgg

SEQ ID NO: 294164 - DNA, 21 bp, Artificial sequence
  SiRNA target sequence
agttagttaaatcagtctggt

SEQ ID NO: 294165 - DNA, 21 bp, Artificial sequence
  SiRNA target sequence
gttagttaaatcagtctggtt

SEQ ID NO: 294166 - DNA, 21 bp, Artificial sequence
  SiRNA target sequence
ttagttaaatcagtctggtta

SEQ ID NO: 294167 - DNA, 21 bp, Artificial sequence
  SiRNA target sequence
tagttaaatcagtctggttaa

SEQ ID NO: 294168 - DNA, 21 bp, Artificial sequence
  SiRNA target sequence
agttaaatcagtctggttaaa

SEQ ID NO: 294169 - DNA, 21 bp, Artificial sequence
  SiRNA target sequence
gttaaatcagtctggttaaag

SEQ ID NO: 294170 - DNA, 21 bp, Artificial sequence
  SiRNA target sequence
ttaaatcagtctggttaaagg

SEQ ID NO: 294171 - DNA, 21 bp, Artificial sequence
  SiRNA target sequence
taaatcagtctggttaaaggg

SEQ ID NO: 294172 - DNA, 21 bp, Artificial sequence
  SiRNA target sequence
aaatcagtctggttaaaggga

SEQ ID NO: 294173 - DNA, 21 bp, Artificial sequence
  SiRNA target sequence
aatcagtctggttaaagggaa

SEQ ID NO: 294174 - DNA, 21 bp, Artificial sequence
  SiRNA target sequence
atcagtctggttaaagggaat

SEQ ID NO: 294175 - DNA, 21 bp, Artificial sequence
  SiRNA target sequence
tcagtctggttaaagggaatg

SEQ ID NO: 294176 - DNA, 21 bp, Artificial sequence
  SiRNA target sequence
cagtctggttaaagggaatgc

SEQ ID NO: 294177 - DNA, 21 bp, Artificial sequence
  SiRNA target sequence
agtctggttaaagggaatgcg

SEQ ID NO: 294178 - DNA, 21 bp, Artificial sequence
  SiRNA target sequence
gtctggttaaagggaatgcgt

SEQ ID NO: 294179 - DNA, 21 bp, Artificial sequence
  SiRNA target sequence
tctggttaaagggaatgcgta

SEQ ID NO: 294180 - DNA, 21 bp, Artificial sequence
  SiRNA target sequence
ctggttaaagggaatgcgtaa

SEQ ID NO: 294181 - DNA, 21 bp, Artificial sequence
  SiRNA target sequence
tggttaaagggaatgcgtaat

SEQ ID NO: 294182 - DNA, 21 bp, Artificial sequence
  SiRNA target sequence
ggttaaagggaatgcgtaatg

SEQ ID NO: 294183 - DNA, 21 bp, Artificial sequence
  SiRNA target sequence
gttaaagggaatgcgtaatga

SEQ ID NO: 294184 - DNA, 21 bp, Artificial sequence
  SiRNA target sequence
ttaaagggaatgcgtaatgaa

SEQ ID NO: 294185 - DNA, 21 bp, Artificial sequence
  SiRNA target sequence
taaagggaatgcgtaatgaat

SEQ ID NO: 294186 - DNA, 21 bp, Artificial sequence
  SiRNA target sequence
aaagggaatgcgtaatgaatt

SEQ ID NO: 294187 - DNA, 21 bp, Artificial sequence
  SiRNA target sequence
aagggaatgcgtaatgaattg

SEQ ID NO: 294188 - DNA, 21 bp, Artificial sequence
  SiRNA target sequence
agggaatgcgtaatgaattga

SEQ ID NO: 294189 - DNA, 21 bp, Artificial sequence
  SiRNA target sequence
gggaatgcgtaatgaattgaa

SEQ ID NO: 294190 - DNA, 21 bp, Artificial sequence
  SiRNA target sequence
ggaatgcgtaatgaattgaag

SEQ ID NO: 294191 - DNA, 21 bp, Artificial sequence
  SiRNA target sequence
gaatgcgtaatgaattgaaga

SEQ ID NO: 294192 - DNA, 21 bp, Artificial sequence
  SiRNA target sequence
aatgcgtaatgaattgaagaa

SEQ ID NO: 294193 - DNA, 21 bp, Artificial sequence
  SiRNA target sequence
atgcgtaatgaattgaagaaa

SEQ ID NO: 294194 - DNA, 21 bp, Artificial sequence
  SiRNA target sequence
tgcgtaatgaattgaagaaag

SEQ ID NO: 294195 - DNA, 21 bp, Artificial sequence
  SiRNA target sequence
gcgtaatgaattgaagaaagt

SEQ ID NO: 294196 - DNA, 21 bp, Artificial sequence
  SiRNA target sequence
cgtaatgaattgaagaaagtt

SEQ ID NO: 294197 - DNA, 21 bp, Artificial sequence
  SiRNA target sequence
gtaatgaattgaagaaagttt

SEQ ID NO: 294198 - DNA, 21 bp, Artificial sequence
  SiRNA target sequence
taatgaattgaagaaagtttt

SEQ ID NO: 294199 - DNA, 21 bp, Artificial sequence
  SiRNA target sequence
aatgaattgaagaaagttttg

SEQ ID NO: 294200 - DNA, 21 bp, Artificial sequence
  SiRNA target sequence
atgaattgaagaaagttttga

SEQ ID NO: 294201 - DNA, 21 bp, Artificial sequence
  SiRNA target sequence
tgaattgaagaaagttttgac

SEQ ID NO: 294202 - DNA, 21 bp, Artificial sequence
  SiRNA target sequence
gaattgaagaaagttttgact

SEQ ID NO: 294203 - DNA, 21 bp, Artificial sequence
  SiRNA target sequence
aattgaagaaagttttgactt

SEQ ID NO: 294204 - DNA, 21 bp, Artificial sequence
  SiRNA target sequence
attgaagaaagttttgactta

SEQ ID NO: 294205 - DNA, 21 bp, Artificial sequence
  SiRNA target sequence
ttgaagaaagttttgacttat

SEQ ID NO: 294206 - DNA, 21 bp, Artificial sequence
  SiRNA target sequence
tgaagaaagttttgacttatg

SEQ ID NO: 294207 - DNA, 21 bp, Artificial sequence
  SiRNA target sequence
gaagaaagttttgacttatga

SEQ ID NO: 294208 - DNA, 21 bp, Artificial sequence
  SiRNA target sequence
aagaaagttttgacttatgag

SEQ ID NO: 294209 - DNA, 21 bp, Artificial sequence
  SiRNA target sequence
agaaagttttgacttatgagg

SEQ ID NO: 294210 - DNA, 21 bp, Artificial sequence
  SiRNA target sequence
gaaagttttgacttatgagga

SEQ ID NO: 294211 - DNA, 21 bp, Artificial sequence
  SiRNA target sequence
aaagttttgacttatgaggaa

SEQ ID NO: 294212 - DNA, 21 bp, Artificial sequence
  SiRNA target sequence
aagttttgacttatgaggaag

SEQ ID NO: 294213 - DNA, 21 bp, Artificial sequence
  SiRNA target sequence
agttttgacttatgaggaagc

SEQ ID NO: 294214 - DNA, 21 bp, Artificial sequence
  SiRNA target sequence
gttttgacttatgaggaagct

SEQ ID NO: 294215 - DNA, 21 bp, Artificial sequence
  SiRNA target sequence
ttttgacttatgaggaagcta

SEQ ID NO: 294216 - DNA, 21 bp, Artificial sequence
  SiRNA target sequence
tttgacttatgaggaagctat

SEQ ID NO: 294217 - DNA, 21 bp, Artificial sequence
  SiRNA target sequence
ttgacttatgaggaagctatt

SEQ ID NO: 294218 - DNA, 21 bp, Artificial sequence
  SiRNA target sequence
tgacttatgaggaagctattt

SEQ ID NO: 294219 - DNA, 21 bp, Artificial sequence
  SiRNA target sequence
gacttatgaggaagctatttg

SEQ ID NO: 294220 - DNA, 21 bp, Artificial sequence
  SiRNA target sequence
acttatgaggaagctatttgt

SEQ ID NO: 294221 - DNA, 21 bp, Artificial sequence
  SiRNA target sequence
cttatgaggaagctatttgtg

SEQ ID NO: 294222 - DNA, 21 bp, Artificial sequence
  SiRNA target sequence
ttatgaggaagctatttgtgg

SEQ ID NO: 294223 - DNA, 21 bp, Artificial sequence
  SiRNA target sequence
tatgaggaagctatttgtgga

SEQ ID NO: 294224 - DNA, 21 bp, Artificial sequence
  SiRNA target sequence
atgaggaagctatttgtggaa

SEQ ID NO: 294225 - DNA, 21 bp, Artificial sequence
  SiRNA target sequence
tgaggaagctatttgtggaaa

SEQ ID NO: 294226 - DNA, 21 bp, Artificial sequence
  SiRNA target sequence
gaggaagctatttgtggaaat

SEQ ID NO: 294227 - DNA, 21 bp, Artificial sequence
  SiRNA target sequence
aggaagctatttgtggaaatg

SEQ ID NO: 294228 - DNA, 21 bp, Artificial sequence
  SiRNA target sequence
ggaagctatttgtggaaatga

SEQ ID NO: 294229 - DNA, 21 bp, Artificial sequence
  SiRNA target sequence
gaagctatttgtggaaatgat

SEQ ID NO: 294230 - DNA, 21 bp, Artificial sequence
  SiRNA target sequence
aagctatttgtggaaatgatt

SEQ ID NO: 294231 - DNA, 21 bp, Artificial sequence
  SiRNA target sequence
agctatttgtggaaatgattc

SEQ ID NO: 294232 - DNA, 21 bp, Artificial sequence
  SiRNA target sequence
gctatttgtggaaatgattca

SEQ ID NO: 294233 - DNA, 21 bp, Artificial sequence
  SiRNA target sequence
ctatttgtggaaatgattcaa

SEQ ID NO: 294234 - DNA, 21 bp, Artificial sequence
  SiRNA target sequence
tatttgtggaaatgattcaag

SEQ ID NO: 294235 - DNA, 21 bp, Artificial sequence
  SiRNA target sequence
atttgtggaaatgattcaagt

SEQ ID NO: 294236 - DNA, 21 bp, Artificial sequence
  SiRNA target sequence
tttgtggaaatgattcaagtg

SEQ ID NO: 294237 - DNA, 21 bp, Artificial sequence
  SiRNA target sequence
ttgtggaaatgattcaagtga

SEQ ID NO: 294238 - DNA, 21 bp, Artificial sequence
  SiRNA target sequence
tgtggaaatgattcaagtgaa

SEQ ID NO: 294239 - DNA, 21 bp, Artificial sequence
  SiRNA target sequence
gtggaaatgattcaagtgaat

SEQ ID NO: 294240 - DNA, 21 bp, Artificial sequence
  SiRNA target sequence
tggaaatgattcaagtgaatt

SEQ ID NO: 294241 - DNA, 21 bp, Artificial sequence
  SiRNA target sequence
ggaaatgattcaagtgaattt

SEQ ID NO: 294242 - DNA, 21 bp, Artificial sequence
  SiRNA target sequence
gaaatgattcaagtgaattta

SEQ ID NO: 294243 - DNA, 21 bp, Artificial sequence
  SiRNA target sequence
aaatgattcaagtgaatttat

SEQ ID NO: 294244 - DNA, 21 bp, Artificial sequence
  SiRNA target sequence
aatgattcaagtgaatttata

SEQ ID NO: 294245 - DNA, 21 bp, Artificial sequence
  SiRNA target sequence
atgattcaagtgaatttatat

SEQ ID NO: 294246 - DNA, 21 bp, Artificial sequence
  SiRNA target sequence
tgattcaagtgaatttatatc

SEQ ID NO: 294247 - DNA, 21 bp, Artificial sequence
  SiRNA target sequence
gattcaagtgaatttatatca

SEQ ID NO: 294248 - DNA, 21 bp, Artificial sequence
  SiRNA target sequence
attcaagtgaatttatatcag

SEQ ID NO: 294249 - DNA, 21 bp, Artificial sequence
  SiRNA target sequence
ttcaagtgaatttatatcagc

SEQ ID NO: 294250 - DNA, 21 bp, Artificial sequence
  SiRNA target sequence
tcaagtgaatttatatcagca

SEQ ID NO: 294251 - DNA, 21 bp, Artificial sequence
  SiRNA target sequence
caagtgaatttatatcagcaa

SEQ ID NO: 294252 - DNA, 21 bp, Artificial sequence
  SiRNA target sequence
aagtgaatttatatcagcaat

SEQ ID NO: 294253 - DNA, 21 bp, Artificial sequence
  SiRNA target sequence
agtgaatttatatcagcaata

SEQ ID NO: 294254 - DNA, 21 bp, Artificial sequence
  SiRNA target sequence
gtgaatttatatcagcaataa

SEQ ID NO: 294255 - DNA, 21 bp, Artificial sequence
  SiRNA target sequence
tgaatttatatcagcaataaa

SEQ ID NO: 294256 - DNA, 21 bp, Artificial sequence
  SiRNA target sequence
gaatttatatcagcaataaat

SEQ ID NO: 294257 - DNA, 21 bp, Artificial sequence
  SiRNA target sequence
aatttatatcagcaataaata

SEQ ID NO: 294258 - DNA, 21 bp, Artificial sequence
  SiRNA target sequence
atttatatcagcaataaatag

SEQ ID NO: 294259 - DNA, 21 bp, Artificial sequence
  SiRNA target sequence
tttatatcagcaataaataga

SEQ ID NO: 294260 - DNA, 21 bp, Artificial sequence
  SiRNA target sequence
ttatatcagcaataaatagat

SEQ ID NO: 294261 - DNA, 21 bp, Artificial sequence
  SiRNA target sequence
tatatcagcaataaatagatc

SEQ ID NO: 294262 - DNA, 21 bp, Artificial sequence
  SiRNA target sequence
atatcagcaataaatagatct

SEQ ID NO: 294263 - DNA, 21 bp, Artificial sequence
  SiRNA target sequence
tatcagcaataaatagatcta

SEQ ID NO: 294264 - DNA, 21 bp, Artificial sequence
  SiRNA target sequence
atcagcaataaatagatctag

SEQ ID NO: 294265 - DNA, 21 bp, Artificial sequence
  SiRNA target sequence
tcagcaataaatagatctagt

SEQ ID NO: 294266 - DNA, 21 bp, Artificial sequence
  SiRNA target sequence
cagcaataaatagatctagtt

SEQ ID NO: 294267 - DNA, 21 bp, Artificial sequence
  SiRNA target sequence
agcaataaatagatctagttc

SEQ ID NO: 294268 - DNA, 21 bp, Artificial sequence
  SiRNA target sequence
gcaataaatagatctagttca

SEQ ID NO: 294269 - DNA, 21 bp, Artificial sequence
  SiRNA target sequence
caataaatagatctagttcac

SEQ ID NO: 294270 - DNA, 21 bp, Artificial sequence
  SiRNA target sequence
aataaatagatctagttcacc

SEQ ID NO: 294271 - DNA, 21 bp, Artificial sequence
  SiRNA target sequence
ataaatagatctagttcaccg

SEQ ID NO: 294272 - DNA, 21 bp, Artificial sequence
  SiRNA target sequence
taaatagatctagttcaccgg

SEQ ID NO: 294273 - DNA, 21 bp, Artificial sequence
  SiRNA target sequence
aaatagatctagttcaccggg

SEQ ID NO: 294274 - DNA, 21 bp, Artificial sequence
  SiRNA target sequence
aatagatctagttcaccgggt

SEQ ID NO: 294275 - DNA, 21 bp, Artificial sequence
  SiRNA target sequence
atagatctagttcaccgggtt

SEQ ID NO: 294276 - DNA, 21 bp, Artificial sequence
  SiRNA target sequence
tagatctagttcaccgggttt

SEQ ID NO: 294277 - DNA, 21 bp, Artificial sequence
  SiRNA target sequence
agatctagttcaccgggtttc

SEQ ID NO: 294278 - DNA, 21 bp, Artificial sequence
  SiRNA target sequence
gatctagttcaccgggtttcc

SEQ ID NO: 294279 - DNA, 21 bp, Artificial sequence
  SiRNA target sequence
atctagttcaccgggtttccc

SEQ ID NO: 294280 - DNA, 21 bp, Artificial sequence
  SiRNA target sequence
tctagttcaccgggtttccca

SEQ ID NO: 294281 - DNA, 21 bp, Artificial sequence
  SiRNA target sequence
ctagttcaccgggtttcccat

SEQ ID NO: 294282 - DNA, 21 bp, Artificial sequence
  SiRNA target sequence
tagttcaccgggtttcccatg

SEQ ID NO: 294283 - DNA, 21 bp, Artificial sequence
  SiRNA target sequence
agttcaccgggtttcccatgg

SEQ ID NO: 294284 - DNA, 21 bp, Artificial sequence
  SiRNA target sequence
gttcaccgggtttcccatgga

SEQ ID NO: 294285 - DNA, 21 bp, Artificial sequence
  SiRNA target sequence
ttcaccgggtttcccatggat

SEQ ID NO: 294286 - DNA, 21 bp, Artificial sequence
  SiRNA target sequence
tcaccgggtttcccatggata

SEQ ID NO: 294287 - DNA, 21 bp, Artificial sequence
  SiRNA target sequence
caccgggtttcccatggatac

SEQ ID NO: 294288 - DNA, 21 bp, Artificial sequence
  SiRNA target sequence
accgggtttcccatggatacg

SEQ ID NO: 294289 - DNA, 21 bp, Artificial sequence
  SiRNA target sequence
ccgggtttcccatggatacgc

SEQ ID NO: 294290 - DNA, 21 bp, Artificial sequence
  SiRNA target sequence
cgggtttcccatggatacgcg

SEQ ID NO: 294291 - DNA, 21 bp, Artificial sequence
  SiRNA target sequence
gggtttcccatggatacgcga

SEQ ID NO: 294292 - DNA, 21 bp, Artificial sequence
  SiRNA target sequence
ggtttcccatggatacgcgat

SEQ ID NO: 294293 - DNA, 21 bp, Artificial sequence
  SiRNA target sequence
gtttcccatggatacgcgata

SEQ ID NO: 294294 - DNA, 21 bp, Artificial sequence
  SiRNA target sequence
tttcccatggatacgcgatag

SEQ ID NO: 294295 - DNA, 21 bp, Artificial sequence
  SiRNA target sequence
ttcccatggatacgcgataga

SEQ ID NO: 294296 - DNA, 21 bp, Artificial sequence
  SiRNA target sequence
tcccatggatacgcgatagaa

SEQ ID NO: 294297 - DNA, 21 bp, Artificial sequence
  SiRNA target sequence
cccatggatacgcgatagaat

SEQ ID NO: 294298 - DNA, 21 bp, Artificial sequence
  SiRNA target sequence
ccatggatacgcgatagaatt

SEQ ID NO: 294299 - DNA, 21 bp, Artificial sequence
  SiRNA target sequence
catggatacgcgatagaatta

SEQ ID NO: 294300 - DNA, 21 bp, Artificial sequence
  SiRNA target sequence
atggatacgcgatagaattaa

SEQ ID NO: 294301 - DNA, 21 bp, Artificial sequence
  SiRNA target sequence
tggatacgcgatagaattaaa

SEQ ID NO: 294302 - DNA, 21 bp, Artificial sequence
  SiRNA target sequence
ggatacgcgatagaattaaag

SEQ ID NO: 294303 - DNA, 21 bp, Artificial sequence
  SiRNA target sequence
gatacgcgatagaattaaagg

SEQ ID NO: 294304 - DNA, 21 bp, Artificial sequence
  SiRNA target sequence
atacgcgatagaattaaagga

SEQ ID NO: 294305 - DNA, 21 bp, Artificial sequence
  SiRNA target sequence
tacgcgatagaattaaaggaa

SEQ ID NO: 294306 - DNA, 21 bp, Artificial sequence
  SiRNA target sequence
acgcgatagaattaaaggaac

SEQ ID NO: 294307 - DNA, 21 bp, Artificial sequence
  SiRNA target sequence
cgcgatagaattaaaggaact

SEQ ID NO: 294308 - DNA, 21 bp, Artificial sequence
  SiRNA target sequence
gcgatagaattaaaggaacta

SEQ ID NO: 294309 - DNA, 21 bp, Artificial sequence
  SiRNA target sequence
cgatagaattaaaggaactaa

SEQ ID NO: 294310 - DNA, 21 bp, Artificial sequence
  SiRNA target sequence
gatagaattaaaggaactaaa

SEQ ID NO: 294311 - DNA, 21 bp, Artificial sequence
  SiRNA target sequence
atagaattaaaggaactaaag

SEQ ID NO: 294312 - DNA, 21 bp, Artificial sequence
  SiRNA target sequence
tagaattaaaggaactaaagg

SEQ ID NO: 294313 - DNA, 21 bp, Artificial sequence
  SiRNA target sequence
agaattaaaggaactaaaggg

SEQ ID NO: 294314 - DNA, 21 bp, Artificial sequence
  SiRNA target sequence
gaattaaaggaactaaaggga

SEQ ID NO: 294315 - DNA, 21 bp, Artificial sequence
  SiRNA target sequence
aattaaaggaactaaagggaa

SEQ ID NO: 294316 - DNA, 21 bp, Artificial sequence
  SiRNA target sequence
attaaaggaactaaagggaag

SEQ ID NO: 294317 - DNA, 21 bp, Artificial sequence
  SiRNA target sequence
ttaaaggaactaaagggaagc

SEQ ID NO: 294318 - DNA, 21 bp, Artificial sequence
  SiRNA target sequence
taaaggaactaaagggaagca

SEQ ID NO: 294319 - DNA, 21 bp, Artificial sequence
  SiRNA target sequence
aaaggaactaaagggaagcaa

SEQ ID NO: 294320 - DNA, 21 bp, Artificial sequence
  SiRNA target sequence
aaggaactaaagggaagcaag

SEQ ID NO: 294321 - DNA, 21 bp, Artificial sequence
  SiRNA target sequence
aggaactaaagggaagcaagg

SEQ ID NO: 294322 - DNA, 21 bp, Artificial sequence
  SiRNA target sequence
ggaactaaagggaagcaaggt

SEQ ID NO: 294323 - DNA, 21 bp, Artificial sequence
  SiRNA target sequence
gaactaaagggaagcaaggtt

SEQ ID NO: 294324 - DNA, 21 bp, Artificial sequence
  SiRNA target sequence
aactaaagggaagcaaggttg

SEQ ID NO: 294325 - DNA, 21 bp, Artificial sequence
  SiRNA target sequence
actaaagggaagcaaggttgg

SEQ ID NO: 294326 - DNA, 21 bp, Artificial sequence
  SiRNA target sequence
ctaaagggaagcaaggttggt

SEQ ID NO: 294327 - DNA, 21 bp, Artificial sequence
  SiRNA target sequence
taaagggaagcaaggttggtt

SEQ ID NO: 294328 - DNA, 21 bp, Artificial sequence
  SiRNA target sequence
aaagggaagcaaggttggttt

SEQ ID NO: 294329 - DNA, 21 bp, Artificial sequence
  SiRNA target sequence
aagggaagcaaggttggtttg

SEQ ID NO: 294330 - DNA, 21 bp, Artificial sequence
  SiRNA target sequence
agggaagcaaggttggtttgg

SEQ ID NO: 294331 - DNA, 21 bp, Artificial sequence
  SiRNA target sequence
gggaagcaaggttggtttggt

SEQ ID NO: 294332 - DNA, 21 bp, Artificial sequence
  SiRNA target sequence
ggaagcaaggttggtttggtg

SEQ ID NO: 294333 - DNA, 21 bp, Artificial sequence
  SiRNA target sequence
gaagcaaggttggtttggtgc

SEQ ID NO: 294334 - DNA, 21 bp, Artificial sequence
  SiRNA target sequence
aagcaaggttggtttggtgcg

SEQ ID NO: 294335 - DNA, 21 bp, Artificial sequence
  SiRNA target sequence
agcaaggttggtttggtgcgg

SEQ ID NO: 294336 - DNA, 21 bp, Artificial sequence
  SiRNA target sequence
gcaaggttggtttggtgcgga

SEQ ID NO: 294337 - DNA, 21 bp, Artificial sequence
  SiRNA target sequence
caaggttggtttggtgcggaa

SEQ ID NO: 294338 - DNA, 21 bp, Artificial sequence
  SiRNA target sequence
aaggttggtttggtgcggaag

SEQ ID NO: 294339 - DNA, 21 bp, Artificial sequence
  SiRNA target sequence
aggttggtttggtgcggaagg

SEQ ID NO: 294340 - DNA, 21 bp, Artificial sequence
  SiRNA target sequence
ggttggtttggtgcggaaggc

SEQ ID NO: 294341 - DNA, 21 bp, Artificial sequence
  SiRNA target sequence
gttggtttggtgcggaaggcg

SEQ ID NO: 294342 - DNA, 21 bp, Artificial sequence
  SiRNA target sequence
ttggtttggtgcggaaggcga

SEQ ID NO: 294343 - DNA, 21 bp, Artificial sequence
  SiRNA target sequence
tggtttggtgcggaaggcgaa

SEQ ID NO: 294344 - DNA, 21 bp, Artificial sequence
  SiRNA target sequence
ggtttggtgcggaaggcgaat

SEQ ID NO: 294345 - DNA, 21 bp, Artificial sequence
  SiRNA target sequence
gtttggtgcggaaggcgaata

SEQ ID NO: 294346 - DNA, 21 bp, Artificial sequence
  SiRNA target sequence
tttggtgcggaaggcgaatat

SEQ ID NO: 294347 - DNA, 21 bp, Artificial sequence
  SiRNA target sequence
ttggtgcggaaggcgaatata

SEQ ID NO: 294348 - DNA, 21 bp, Artificial sequence
  SiRNA target sequence
tggtgcggaaggcgaatatat

SEQ ID NO: 294349 - DNA, 21 bp, Artificial sequence
  SiRNA target sequence
ggtgcggaaggcgaatatatt

SEQ ID NO: 294350 - DNA, 21 bp, Artificial sequence
  SiRNA target sequence
gtgcggaaggcgaatatattc

SEQ ID NO: 294351 - DNA, 21 bp, Artificial sequence
  SiRNA target sequence
tgcggaaggcgaatatattct

SEQ ID NO: 294352 - DNA, 21 bp, Artificial sequence
  SiRNA target sequence
gcggaaggcgaatatattctg

SEQ ID NO: 294353 - DNA, 21 bp, Artificial sequence
  SiRNA target sequence
cggaaggcgaatatattctgg

SEQ ID NO: 294354 - DNA, 21 bp, Artificial sequence
  SiRNA target sequence
ggaaggcgaatatattctgga

SEQ ID NO: 294355 - DNA, 21 bp, Artificial sequence
  SiRNA target sequence
gaaggcgaatatattctggat

SEQ ID NO: 294356 - DNA, 21 bp, Artificial sequence
  SiRNA target sequence
aaggcgaatatattctggatg

SEQ ID NO: 294357 - DNA, 21 bp, Artificial sequence
  SiRNA target sequence
aggcgaatatattctggatga

SEQ ID NO: 294358 - DNA, 21 bp, Artificial sequence
  SiRNA target sequence
ggcgaatatattctggatgaa

SEQ ID NO: 294359 - DNA, 21 bp, Artificial sequence
  SiRNA target sequence
gcgaatatattctggatgaag

SEQ ID NO: 294360 - DNA, 21 bp, Artificial sequence
  SiRNA target sequence
cgaatatattctggatgaaga

SEQ ID NO: 294361 - DNA, 21 bp, Artificial sequence
  SiRNA target sequence
gaatatattctggatgaagat

SEQ ID NO: 294362 - DNA, 21 bp, Artificial sequence
  SiRNA target sequence
aatatattctggatgaagatg

SEQ ID NO: 294363 - DNA, 21 bp, Artificial sequence
  SiRNA target sequence
atatattctggatgaagatgt

SEQ ID NO: 294364 - DNA, 21 bp, Artificial sequence
  SiRNA target sequence
tatattctggatgaagatgtc

SEQ ID NO: 294365 - DNA, 21 bp, Artificial sequence
  SiRNA target sequence
atattctggatgaagatgtct

SEQ ID NO: 294366 - DNA, 21 bp, Artificial sequence
  SiRNA target sequence
tattctggatgaagatgtctt

SEQ ID NO: 294367 - DNA, 21 bp, Artificial sequence
  SiRNA target sequence
attctggatgaagatgtcttt

SEQ ID NO: 294368 - DNA, 21 bp, Artificial sequence
  SiRNA target sequence
ttctggatgaagatgtctttg

SEQ ID NO: 294369 - DNA, 21 bp, Artificial sequence
  SiRNA target sequence
tctggatgaagatgtctttga

SEQ ID NO: 294370 - DNA, 21 bp, Artificial sequence
  SiRNA target sequence
ctggatgaagatgtctttgaa

SEQ ID NO: 294371 - DNA, 21 bp, Artificial sequence
  SiRNA target sequence
tggatgaagatgtctttgaag

SEQ ID NO: 294372 - DNA, 21 bp, Artificial sequence
  SiRNA target sequence
ggatgaagatgtctttgaagc

SEQ ID NO: 294373 - DNA, 21 bp, Artificial sequence
  SiRNA target sequence
gatgaagatgtctttgaagcg

SEQ ID NO: 294374 - DNA, 21 bp, Artificial sequence
  SiRNA target sequence
atgaagatgtctttgaagcgg

SEQ ID NO: 294375 - DNA, 21 bp, Artificial sequence
  SiRNA target sequence
tgaagatgtctttgaagcggt

SEQ ID NO: 294376 - DNA, 21 bp, Artificial sequence
  SiRNA target sequence
gaagatgtctttgaagcggtt

SEQ ID NO: 294377 - DNA, 21 bp, Artificial sequence
  SiRNA target sequence
aagatgtctttgaagcggtta

SEQ ID NO: 294378 - DNA, 21 bp, Artificial sequence
  SiRNA target sequence
agatgtctttgaagcggttaa

SEQ ID NO: 294379 - DNA, 21 bp, Artificial sequence
  SiRNA target sequence
gatgtctttgaagcggttaaa

SEQ ID NO: 294380 - DNA, 21 bp, Artificial sequence
  SiRNA target sequence
atgtctttgaagcggttaaaa

SEQ ID NO: 294381 - DNA, 21 bp, Artificial sequence
  SiRNA target sequence
tgtctttgaagcggttaaaac

SEQ ID NO: 294382 - DNA, 21 bp, Artificial sequence
  SiRNA target sequence
gtctttgaagcggttaaaaca

SEQ ID NO: 294383 - DNA, 21 bp, Artificial sequence
  SiRNA target sequence
tctttgaagcggttaaaacac

SEQ ID NO: 294384 - DNA, 21 bp, Artificial sequence
  SiRNA target sequence
ctttgaagcggttaaaacacg

SEQ ID NO: 294385 - DNA, 21 bp, Artificial sequence
  SiRNA target sequence
tttgaagcggttaaaacacgt

SEQ ID NO: 294386 - DNA, 21 bp, Artificial sequence
  SiRNA target sequence
ttgaagcggttaaaacacgta

SEQ ID NO: 294387 - DNA, 21 bp, Artificial sequence
  SiRNA target sequence
tgaagcggttaaaacacgtat

SEQ ID NO: 294388 - DNA, 21 bp, Artificial sequence
  SiRNA target sequence
gaagcggttaaaacacgtatt

SEQ ID NO: 294389 - DNA, 21 bp, Artificial sequence
  SiRNA target sequence
aagcggttaaaacacgtattc

SEQ ID NO: 294390 - DNA, 21 bp, Artificial sequence
  SiRNA target sequence
agcggttaaaacacgtattca

SEQ ID NO: 294391 - DNA, 21 bp, Artificial sequence
  SiRNA target sequence
gcggttaaaacacgtattcag

SEQ ID NO: 294392 - DNA, 21 bp, Artificial sequence
  SiRNA target sequence
cggttaaaacacgtattcaga

SEQ ID NO: 294393 - DNA, 21 bp, Artificial sequence
  SiRNA target sequence
ggttaaaacacgtattcagaa

SEQ ID NO: 294394 - DNA, 21 bp, Artificial sequence
  SiRNA target sequence
gttaaaacacgtattcagaat

SEQ ID NO: 294395 - DNA, 21 bp, Artificial sequence
  SiRNA target sequence
ttaaaacacgtattcagaatg

SEQ ID NO: 294396 - DNA, 21 bp, Artificial sequence
  SiRNA target sequence
taaaacacgtattcagaatgc

SEQ ID NO: 294397 - DNA, 21 bp, Artificial sequence
  SiRNA target sequence
aaaacacgtattcagaatgca

SEQ ID NO: 294398 - DNA, 21 bp, Artificial sequence
  SiRNA target sequence
aaacacgtattcagaatgcaa

SEQ ID NO: 294399 - DNA, 21 bp, Artificial sequence
  SiRNA target sequence
aacacgtattcagaatgcaaa

SEQ ID NO: 294400 - DNA, 21 bp, Artificial sequence
  SiRNA target sequence
acacgtattcagaatgcaaag

SEQ ID NO: 294401 - DNA, 21 bp, Artificial sequence
  SiRNA target sequence
cacgtattcagaatgcaaaga

SEQ ID NO: 294402 - DNA, 21 bp, Artificial sequence
  SiRNA target sequence
acgtattcagaatgcaaagaa

SEQ ID NO: 294403 - DNA, 21 bp, Artificial sequence
  SiRNA target sequence
cgtattcagaatgcaaagaat

SEQ ID NO: 294404 - DNA, 21 bp, Artificial sequence
  SiRNA target sequence
gtattcagaatgcaaagaatg

SEQ ID NO: 294405 - DNA, 21 bp, Artificial sequence
  SiRNA target sequence
tattcagaatgcaaagaatgg

SEQ ID NO: 294406 - DNA, 21 bp, Artificial sequence
  SiRNA target sequence
attcagaatgcaaagaatggt

SEQ ID NO: 294407 - DNA, 21 bp, Artificial sequence
  SiRNA target sequence
ttcagaatgcaaagaatggtg

SEQ ID NO: 294408 - DNA, 21 bp, Artificial sequence
  SiRNA target sequence
tcagaatgcaaagaatggtgt

SEQ ID NO: 294409 - DNA, 21 bp, Artificial sequence
  SiRNA target sequence
cagaatgcaaagaatggtgtg

SEQ ID NO: 294410 - DNA, 21 bp, Artificial sequence
  SiRNA target sequence
agaatgcaaagaatggtgtga

SEQ ID NO: 294411 - DNA, 21 bp, Artificial sequence
  SiRNA target sequence
gaatgcaaagaatggtgtgag

SEQ ID NO: 294412 - DNA, 21 bp, Artificial sequence
  SiRNA target sequence
aatgcaaagaatggtgtgaga

SEQ ID NO: 294413 - DNA, 21 bp, Artificial sequence
  SiRNA target sequence
atgcaaagaatggtgtgagaa

SEQ ID NO: 294414 - DNA, 21 bp, Artificial sequence
  SiRNA target sequence
tgcaaagaatggtgtgagaac

SEQ ID NO: 294415 - DNA, 21 bp, Artificial sequence
  SiRNA target sequence
gcaaagaatggtgtgagaaca

SEQ ID NO: 294416 - DNA, 21 bp, Artificial sequence
  SiRNA target sequence
caaagaatggtgtgagaacac

SEQ ID NO: 294417 - DNA, 21 bp, Artificial sequence
  SiRNA target sequence
aaagaatggtgtgagaacacc

SEQ ID NO: 294418 - DNA, 21 bp, Artificial sequence
  SiRNA target sequence
aagaatggtgtgagaacacct

SEQ ID NO: 294419 - DNA, 21 bp, Artificial sequence
  SiRNA target sequence
agaatggtgtgagaacacctg

SEQ ID NO: 294420 - DNA, 21 bp, Artificial sequence
  SiRNA target sequence
gaatggtgtgagaacacctgt

SEQ ID NO: 294421 - DNA, 21 bp, Artificial sequence
  SiRNA target sequence
aatggtgtgagaacacctgta

SEQ ID NO: 294422 - DNA, 21 bp, Artificial sequence
  SiRNA target sequence
atggtgtgagaacacctgtaa

SEQ ID NO: 294423 - DNA, 21 bp, Artificial sequence
  SiRNA target sequence
tggtgtgagaacacctgtaat

SEQ ID NO: 294424 - DNA, 21 bp, Artificial sequence
  SiRNA target sequence
ggtgtgagaacacctgtaatg

SEQ ID NO: 294425 - DNA, 21 bp, Artificial sequence
  SiRNA target sequence
gtgtgagaacacctgtaatgt

SEQ ID NO: 294426 - DNA, 21 bp, Artificial sequence
  SiRNA target sequence
tgtgagaacacctgtaatgtg

SEQ ID NO: 294427 - DNA, 21 bp, Artificial sequence
  SiRNA target sequence
gtgagaacacctgtaatgtgg

SEQ ID NO: 294428 - DNA, 21 bp, Artificial sequence
  SiRNA target sequence
tgagaacacctgtaatgtggg

SEQ ID NO: 294429 - DNA, 21 bp, Artificial sequence
  SiRNA target sequence
gagaacacctgtaatgtgggt

SEQ ID NO: 294430 - DNA, 21 bp, Artificial sequence
  SiRNA target sequence
agaacacctgtaatgtgggtg

SEQ ID NO: 294431 - DNA, 21 bp, Artificial sequence
  SiRNA target sequence
gaacacctgtaatgtgggtgg

SEQ ID NO: 294432 - DNA, 21 bp, Artificial sequence
  SiRNA target sequence
aacacctgtaatgtgggtgga

SEQ ID NO: 294433 - DNA, 21 bp, Artificial sequence
  SiRNA target sequence
acacctgtaatgtgggtggat

SEQ ID NO: 294434 - DNA, 21 bp, Artificial sequence
  SiRNA target sequence
cacctgtaatgtgggtggata

SEQ ID NO: 294435 - DNA, 21 bp, Artificial sequence
  SiRNA target sequence
acctgtaatgtgggtggatac

SEQ ID NO: 294436 - DNA, 21 bp, Artificial sequence
  SiRNA target sequence
cctgtaatgtgggtggataca

SEQ ID NO: 294437 - DNA, 21 bp, Artificial sequence
  SiRNA target sequence
ctgtaatgtgggtggatacat

SEQ ID NO: 294438 - DNA, 21 bp, Artificial sequence
  SiRNA target sequence
tgtaatgtgggtggatacatt

SEQ ID NO: 294439 - DNA, 21 bp, Artificial sequence
  SiRNA target sequence
gtaatgtgggtggatacatta

SEQ ID NO: 294440 - DNA, 21 bp, Artificial sequence
  SiRNA target sequence
taatgtgggtggatacattaa

SEQ ID NO: 294441 - DNA, 21 bp, Artificial sequence
  SiRNA target sequence
aatgtgggtggatacattaaa

SEQ ID NO: 294442 - DNA, 21 bp, Artificial sequence
  SiRNA target sequence
atgtgggtggatacattaaag

SEQ ID NO: 294443 - DNA, 21 bp, Artificial sequence
  SiRNA target sequence
tgtgggtggatacattaaagg

SEQ ID NO: 294444 - DNA, 21 bp, Artificial sequence
  SiRNA target sequence
gtgggtggatacattaaagga

SEQ ID NO: 294445 - DNA, 21 bp, Artificial sequence
  SiRNA target sequence
tgggtggatacattaaaggat

SEQ ID NO: 294446 - DNA, 21 bp, Artificial sequence
  SiRNA target sequence
gggtggatacattaaaggatg

SEQ ID NO: 294447 - DNA, 21 bp, Artificial sequence
  SiRNA target sequence
ggtggatacattaaaggatga

SEQ ID NO: 294448 - DNA, 21 bp, Artificial sequence
  SiRNA target sequence
gtggatacattaaaggatgag

SEQ ID NO: 294449 - DNA, 21 bp, Artificial sequence
  SiRNA target sequence
tggatacattaaaggatgaga

SEQ ID NO: 294450 - DNA, 21 bp, Artificial sequence
  SiRNA target sequence
ggatacattaaaggatgagag

SEQ ID NO: 294451 - DNA, 21 bp, Artificial sequence
  SiRNA target sequence
gatacattaaaggatgagaga

SEQ ID NO: 294452 - DNA, 21 bp, Artificial sequence
  SiRNA target sequence
atacattaaaggatgagagaa

SEQ ID NO: 294453 - DNA, 21 bp, Artificial sequence
  SiRNA target sequence
tacattaaaggatgagagaag

SEQ ID NO: 294454 - DNA, 21 bp, Artificial sequence
  SiRNA target sequence
acattaaaggatgagagaaga

SEQ ID NO: 294455 - DNA, 21 bp, Artificial sequence
  SiRNA target sequence
cattaaaggatgagagaagac

SEQ ID NO: 294456 - DNA, 21 bp, Artificial sequence
  SiRNA target sequence
attaaaggatgagagaagacc

SEQ ID NO: 294457 - DNA, 21 bp, Artificial sequence
  SiRNA target sequence
ttaaaggatgagagaagacca

SEQ ID NO: 294458 - DNA, 21 bp, Artificial sequence
  SiRNA target sequence
taaaggatgagagaagaccaa

SEQ ID NO: 294459 - DNA, 21 bp, Artificial sequence
  SiRNA target sequence
aaaggatgagagaagaccaat

SEQ ID NO: 294460 - DNA, 21 bp, Artificial sequence
  SiRNA target sequence
aaggatgagagaagaccaatt

SEQ ID NO: 294461 - DNA, 21 bp, Artificial sequence
  SiRNA target sequence
aggatgagagaagaccaattg

SEQ ID NO: 294462 - DNA, 21 bp, Artificial sequence
  SiRNA target sequence
ggatgagagaagaccaattga

SEQ ID NO: 294463 - DNA, 21 bp, Artificial sequence
  SiRNA target sequence
gatgagagaagaccaattgaa

SEQ ID NO: 294464 - DNA, 21 bp, Artificial sequence
  SiRNA target sequence
atgagagaagaccaattgaaa

SEQ ID NO: 294465 - DNA, 21 bp, Artificial sequence
  SiRNA target sequence
tgagagaagaccaattgaaaa

SEQ ID NO: 294466 - DNA, 21 bp, Artificial sequence
  SiRNA target sequence
gagagaagaccaattgaaaaa

SEQ ID NO: 294467 - DNA, 21 bp, Artificial sequence
  SiRNA target sequence
agagaagaccaattgaaaaag

SEQ ID NO: 294468 - DNA, 21 bp, Artificial sequence
  SiRNA target sequence
gagaagaccaattgaaaaagt

SEQ ID NO: 294469 - DNA, 21 bp, Artificial sequence
  SiRNA target sequence
agaagaccaattgaaaaagta

SEQ ID NO: 294470 - DNA, 21 bp, Artificial sequence
  SiRNA target sequence
gaagaccaattgaaaaagtag

SEQ ID NO: 294471 - DNA, 21 bp, Artificial sequence
  SiRNA target sequence
aagaccaattgaaaaagtaga

SEQ ID NO: 294472 - DNA, 21 bp, Artificial sequence
  SiRNA target sequence
agaccaattgaaaaagtagat

SEQ ID NO: 294473 - DNA, 21 bp, Artificial sequence
  SiRNA target sequence
gaccaattgaaaaagtagatc

SEQ ID NO: 294474 - DNA, 21 bp, Artificial sequence
  SiRNA target sequence
accaattgaaaaagtagatca

SEQ ID NO: 294475 - DNA, 21 bp, Artificial sequence
  SiRNA target sequence
ccaattgaaaaagtagatcaa

SEQ ID NO: 294476 - DNA, 21 bp, Artificial sequence
  SiRNA target sequence
caattgaaaaagtagatcaac

SEQ ID NO: 294477 - DNA, 21 bp, Artificial sequence
  SiRNA target sequence
aattgaaaaagtagatcaact

SEQ ID NO: 294478 - DNA, 21 bp, Artificial sequence
  SiRNA target sequence
attgaaaaagtagatcaactg

SEQ ID NO: 294479 - DNA, 21 bp, Artificial sequence
  SiRNA target sequence
ttgaaaaagtagatcaactga

SEQ ID NO: 294480 - DNA, 21 bp, Artificial sequence
  SiRNA target sequence
tgaaaaagtagatcaactgaa

SEQ ID NO: 294481 - DNA, 21 bp, Artificial sequence
  SiRNA target sequence
gaaaaagtagatcaactgaaa

SEQ ID NO: 294482 - DNA, 21 bp, Artificial sequence
  SiRNA target sequence
aaaaagtagatcaactgaaaa

SEQ ID NO: 294483 - DNA, 21 bp, Artificial sequence
  SiRNA target sequence
aaaagtagatcaactgaaaac

SEQ ID NO: 294484 - DNA, 21 bp, Artificial sequence
  SiRNA target sequence
aaagtagatcaactgaaaaca

SEQ ID NO: 294485 - DNA, 21 bp, Artificial sequence
  SiRNA target sequence
aagtagatcaactgaaaacac

SEQ ID NO: 294486 - DNA, 21 bp, Artificial sequence
  SiRNA target sequence
agtagatcaactgaaaacacg

SEQ ID NO: 294487 - DNA, 21 bp, Artificial sequence
  SiRNA target sequence
gtagatcaactgaaaacacgt

SEQ ID NO: 294488 - DNA, 21 bp, Artificial sequence
  SiRNA target sequence
tagatcaactgaaaacacgtg

SEQ ID NO: 294489 - DNA, 21 bp, Artificial sequence
  SiRNA target sequence
agatcaactgaaaacacgtgt

SEQ ID NO: 294490 - DNA, 21 bp, Artificial sequence
  SiRNA target sequence
gatcaactgaaaacacgtgtg

SEQ ID NO: 294491 - DNA, 21 bp, Artificial sequence
  SiRNA target sequence
atcaactgaaaacacgtgtgt

SEQ ID NO: 294492 - DNA, 21 bp, Artificial sequence
  SiRNA target sequence
tcaactgaaaacacgtgtgtt

SEQ ID NO: 294493 - DNA, 21 bp, Artificial sequence
  SiRNA target sequence
caactgaaaacacgtgtgttt

SEQ ID NO: 294494 - DNA, 21 bp, Artificial sequence
  SiRNA target sequence
aactgaaaacacgtgtgtttt

SEQ ID NO: 294495 - DNA, 21 bp, Artificial sequence
  SiRNA target sequence
actgaaaacacgtgtgttttc

SEQ ID NO: 294496 - DNA, 21 bp, Artificial sequence
  SiRNA target sequence
ctgaaaacacgtgtgttttct

SEQ ID NO: 294497 - DNA, 21 bp, Artificial sequence
  SiRNA target sequence
tgaaaacacgtgtgttttcta

SEQ ID NO: 294498 - DNA, 21 bp, Artificial sequence
  SiRNA target sequence
gaaaacacgtgtgttttctaa

SEQ ID NO: 294499 - DNA, 21 bp, Artificial sequence
  SiRNA target sequence
aaaacacgtgtgttttctaat

SEQ ID NO: 294500 - DNA, 21 bp, Artificial sequence
  SiRNA target sequence
aaacacgtgtgttttctaatg

SEQ ID NO: 294501 - DNA, 21 bp, Artificial sequence
  SiRNA target sequence
aacacgtgtgttttctaatgg

SEQ ID NO: 294502 - DNA, 21 bp, Artificial sequence
  SiRNA target sequence
acacgtgtgttttctaatggg

SEQ ID NO: 294503 - DNA, 21 bp, Artificial sequence
  SiRNA target sequence
cacgtgtgttttctaatgggc

SEQ ID NO: 294504 - DNA, 21 bp, Artificial sequence
  SiRNA target sequence
acgtgtgttttctaatgggcc

SEQ ID NO: 294505 - DNA, 21 bp, Artificial sequence
  SiRNA target sequence
cgtgtgttttctaatgggcct

SEQ ID NO: 294506 - DNA, 21 bp, Artificial sequence
  SiRNA target sequence
gtgtgttttctaatgggccta

SEQ ID NO: 294507 - DNA, 21 bp, Artificial sequence
  SiRNA target sequence
tgtgttttctaatgggcctat

SEQ ID NO: 294508 - DNA, 21 bp, Artificial sequence
  SiRNA target sequence
gtgttttctaatgggcctatg

SEQ ID NO: 294509 - DNA, 21 bp, Artificial sequence
  SiRNA target sequence
tgttttctaatgggcctatgg

SEQ ID NO: 294510 - DNA, 21 bp, Artificial sequence
  SiRNA target sequence
gttttctaatgggcctatgga

SEQ ID NO: 294511 - DNA, 21 bp, Artificial sequence
  SiRNA target sequence
ttttctaatgggcctatggac

SEQ ID NO: 294512 - DNA, 21 bp, Artificial sequence
  SiRNA target sequence
tttctaatgggcctatggact

SEQ ID NO: 294513 - DNA, 21 bp, Artificial sequence
  SiRNA target sequence
ttctaatgggcctatggactt

SEQ ID NO: 294514 - DNA, 21 bp, Artificial sequence
  SiRNA target sequence
tctaatgggcctatggacttt

SEQ ID NO: 294515 - DNA, 21 bp, Artificial sequence
  SiRNA target sequence
ctaatgggcctatggactttt

SEQ ID NO: 294516 - DNA, 21 bp, Artificial sequence
  SiRNA target sequence
taatgggcctatggacttttc

SEQ ID NO: 294517 - DNA, 21 bp, Artificial sequence
  SiRNA target sequence
aatgggcctatggacttttct

SEQ ID NO: 294518 - DNA, 21 bp, Artificial sequence
  SiRNA target sequence
atgggcctatggacttttcta

SEQ ID NO: 294519 - DNA, 21 bp, Artificial sequence
  SiRNA target sequence
tgggcctatggacttttctat

SEQ ID NO: 294520 - DNA, 21 bp, Artificial sequence
  SiRNA target sequence
gggcctatggacttttctatc

SEQ ID NO: 294521 - DNA, 21 bp, Artificial sequence
  SiRNA target sequence
ggcctatggacttttctatca

SEQ ID NO: 294522 - DNA, 21 bp, Artificial sequence
  SiRNA target sequence
gcctatggacttttctatcac

SEQ ID NO: 294523 - DNA, 21 bp, Artificial sequence
  SiRNA target sequence
cctatggacttttctatcact

SEQ ID NO: 294524 - DNA, 21 bp, Artificial sequence
  SiRNA target sequence
ctatggacttttctatcactt

SEQ ID NO: 294525 - DNA, 21 bp, Artificial sequence
  SiRNA target sequence
tatggacttttctatcacttt

SEQ ID NO: 294526 - DNA, 21 bp, Artificial sequence
  SiRNA target sequence
atggacttttctatcactttt

SEQ ID NO: 294527 - DNA, 21 bp, Artificial sequence
  SiRNA target sequence
tggacttttctatcactttta

SEQ ID NO: 294528 - DNA, 21 bp, Artificial sequence
  SiRNA target sequence
ggacttttctatcacttttag

SEQ ID NO: 294529 - DNA, 21 bp, Artificial sequence
  SiRNA target sequence
gacttttctatcacttttaga

SEQ ID NO: 294530 - DNA, 21 bp, Artificial sequence
  SiRNA target sequence
acttttctatcacttttagaa

SEQ ID NO: 294531 - DNA, 21 bp, Artificial sequence
  SiRNA target sequence
cttttctatcacttttagaat

SEQ ID NO: 294532 - DNA, 21 bp, Artificial sequence
  SiRNA target sequence
ttttctatcacttttagaatg

SEQ ID NO: 294533 - DNA, 21 bp, Artificial sequence
  SiRNA target sequence
tttctatcacttttagaatgt

SEQ ID NO: 294534 - DNA, 21 bp, Artificial sequence
  SiRNA target sequence
ttctatcacttttagaatgta

SEQ ID NO: 294535 - DNA, 21 bp, Artificial sequence
  SiRNA target sequence
tctatcacttttagaatgtac

SEQ ID NO: 294536 - DNA, 21 bp, Artificial sequence
  SiRNA target sequence
ctatcacttttagaatgtact

SEQ ID NO: 294537 - DNA, 21 bp, Artificial sequence
  SiRNA target sequence
tatcacttttagaatgtacta

SEQ ID NO: 294538 - DNA, 21 bp, Artificial sequence
  SiRNA target sequence
atcacttttagaatgtactat

SEQ ID NO: 294539 - DNA, 21 bp, Artificial sequence
  SiRNA target sequence
tcacttttagaatgtactatt

SEQ ID NO: 294540 - DNA, 21 bp, Artificial sequence
  SiRNA target sequence
cacttttagaatgtactattt

SEQ ID NO: 294541 - DNA, 21 bp, Artificial sequence
  SiRNA target sequence
acttttagaatgtactatttg

SEQ ID NO: 294542 - DNA, 21 bp, Artificial sequence
  SiRNA target sequence
cttttagaatgtactatttgg

SEQ ID NO: 294543 - DNA, 21 bp, Artificial sequence
  SiRNA target sequence
ttttagaatgtactatttggg

SEQ ID NO: 294544 - DNA, 21 bp, Artificial sequence
  SiRNA target sequence
tttagaatgtactatttgggc

SEQ ID NO: 294545 - DNA, 21 bp, Artificial sequence
  SiRNA target sequence
ttagaatgtactatttgggct

SEQ ID NO: 294546 - DNA, 21 bp, Artificial sequence
  SiRNA target sequence
tagaatgtactatttgggctt

SEQ ID NO: 294547 - DNA, 21 bp, Artificial sequence
  SiRNA target sequence
agaatgtactatttgggcttc

SEQ ID NO: 294548 - DNA, 21 bp, Artificial sequence
  SiRNA target sequence
gaatgtactatttgggcttca

SEQ ID NO: 294549 - DNA, 21 bp, Artificial sequence
  SiRNA target sequence
aatgtactatttgggcttcat

SEQ ID NO: 294550 - DNA, 21 bp, Artificial sequence
  SiRNA target sequence
atgtactatttgggcttcata

SEQ ID NO: 294551 - DNA, 21 bp, Artificial sequence
  SiRNA target sequence
tgtactatttgggcttcatag

SEQ ID NO: 294552 - DNA, 21 bp, Artificial sequence
  SiRNA target sequence
gtactatttgggcttcatagc

SEQ ID NO: 294553 - DNA, 21 bp, Artificial sequence
  SiRNA target sequence
tactatttgggcttcatagca

SEQ ID NO: 294554 - DNA, 21 bp, Artificial sequence
  SiRNA target sequence
actatttgggcttcatagcac

SEQ ID NO: 294555 - DNA, 21 bp, Artificial sequence
  SiRNA target sequence
ctatttgggcttcatagcaca

SEQ ID NO: 294556 - DNA, 21 bp, Artificial sequence
  SiRNA target sequence
tatttgggcttcatagcacac

SEQ ID NO: 294557 - DNA, 21 bp, Artificial sequence
  SiRNA target sequence
atttgggcttcatagcacacc

SEQ ID NO: 294558 - DNA, 21 bp, Artificial sequence
  SiRNA target sequence
tttgggcttcatagcacacct

SEQ ID NO: 294559 - DNA, 21 bp, Artificial sequence
  SiRNA target sequence
ttgggcttcatagcacacctt

SEQ ID NO: 294560 - DNA, 21 bp, Artificial sequence
  SiRNA target sequence
tgggcttcatagcacacctta

SEQ ID NO: 294561 - DNA, 21 bp, Artificial sequence
  SiRNA target sequence
gggcttcatagcacaccttat

SEQ ID NO: 294562 - DNA, 21 bp, Artificial sequence
  SiRNA target sequence
ggcttcatagcacaccttatg

SEQ ID NO: 294563 - DNA, 21 bp, Artificial sequence
  SiRNA target sequence
gcttcatagcacaccttatgg

SEQ ID NO: 294564 - DNA, 21 bp, Artificial sequence
  SiRNA target sequence
cttcatagcacaccttatgga

SEQ ID NO: 294565 - DNA, 21 bp, Artificial sequence
  SiRNA target sequence
ttcatagcacaccttatggaa

SEQ ID NO: 294566 - DNA, 21 bp, Artificial sequence
  SiRNA target sequence
tcatagcacaccttatggaaa

SEQ ID NO: 294567 - DNA, 21 bp, Artificial sequence
  SiRNA target sequence
catagcacaccttatggaaaa

SEQ ID NO: 294568 - DNA, 21 bp, Artificial sequence
  SiRNA target sequence
atagcacaccttatggaaaat

SEQ ID NO: 294569 - DNA, 21 bp, Artificial sequence
  SiRNA target sequence
tagcacaccttatggaaaatc

SEQ ID NO: 294570 - DNA, 21 bp, Artificial sequence
  SiRNA target sequence
agcacaccttatggaaaatcg

SEQ ID NO: 294571 - DNA, 21 bp, Artificial sequence
  SiRNA target sequence
gcacaccttatggaaaatcga

SEQ ID NO: 294572 - DNA, 21 bp, Artificial sequence
  SiRNA target sequence
cacaccttatggaaaatcgaa

SEQ ID NO: 294573 - DNA, 21 bp, Artificial sequence
  SiRNA target sequence
acaccttatggaaaatcgaat

SEQ ID NO: 294574 - DNA, 21 bp, Artificial sequence
  SiRNA target sequence
caccttatggaaaatcgaata

SEQ ID NO: 294575 - DNA, 21 bp, Artificial sequence
  SiRNA target sequence
accttatggaaaatcgaataa

SEQ ID NO: 294576 - DNA, 21 bp, Artificial sequence
  SiRNA target sequence
ccttatggaaaatcgaataac

SEQ ID NO: 294577 - DNA, 21 bp, Artificial sequence
  SiRNA target sequence
cttatggaaaatcgaataacc

SEQ ID NO: 294578 - DNA, 21 bp, Artificial sequence
  SiRNA target sequence
ttatggaaaatcgaataacca

SEQ ID NO: 294579 - DNA, 21 bp, Artificial sequence
  SiRNA target sequence
tatggaaaatcgaataaccaa

SEQ ID NO: 294580 - DNA, 21 bp, Artificial sequence
  SiRNA target sequence
atggaaaatcgaataaccaat

SEQ ID NO: 294581 - DNA, 21 bp, Artificial sequence
  SiRNA target sequence
tggaaaatcgaataaccaatg

SEQ ID NO: 294582 - DNA, 21 bp, Artificial sequence
  SiRNA target sequence
ggaaaatcgaataaccaatga

SEQ ID NO: 294583 - DNA, 21 bp, Artificial sequence
  SiRNA target sequence
gaaaatcgaataaccaatgaa

SEQ ID NO: 294584 - DNA, 21 bp, Artificial sequence
  SiRNA target sequence
aaaatcgaataaccaatgaag

SEQ ID NO: 294585 - DNA, 21 bp, Artificial sequence
  SiRNA target sequence
aaatcgaataaccaatgaagt

SEQ ID NO: 294586 - DNA, 21 bp, Artificial sequence
  SiRNA target sequence
aatcgaataaccaatgaagta

SEQ ID NO: 294587 - DNA, 21 bp, Artificial sequence
  SiRNA target sequence
atcgaataaccaatgaagtat

SEQ ID NO: 294588 - DNA, 21 bp, Artificial sequence
  SiRNA target sequence
tcgaataaccaatgaagtatc

SEQ ID NO: 294589 - DNA, 21 bp, Artificial sequence
  SiRNA target sequence
cgaataaccaatgaagtatcc

SEQ ID NO: 294590 - DNA, 21 bp, Artificial sequence
  SiRNA target sequence
gaataaccaatgaagtatcca

SEQ ID NO: 294591 - DNA, 21 bp, Artificial sequence
  SiRNA target sequence
aataaccaatgaagtatccat

SEQ ID NO: 294592 - DNA, 21 bp, Artificial sequence
  SiRNA target sequence
ataaccaatgaagtatccata

SEQ ID NO: 294593 - DNA, 21 bp, Artificial sequence
  SiRNA target sequence
taaccaatgaagtatccatag

SEQ ID NO: 294594 - DNA, 21 bp, Artificial sequence
  SiRNA target sequence
aaccaatgaagtatccatagg

SEQ ID NO: 294595 - DNA, 21 bp, Artificial sequence
  SiRNA target sequence
accaatgaagtatccatagga

SEQ ID NO: 294596 - DNA, 21 bp, Artificial sequence
  SiRNA target sequence
ccaatgaagtatccataggaa

SEQ ID NO: 294597 - DNA, 21 bp, Artificial sequence
  SiRNA target sequence
caatgaagtatccataggaac

SEQ ID NO: 294598 - DNA, 21 bp, Artificial sequence
  SiRNA target sequence
aatgaagtatccataggaact

SEQ ID NO: 294599 - DNA, 21 bp, Artificial sequence
  SiRNA target sequence
atgaagtatccataggaacta

SEQ ID NO: 294600 - DNA, 21 bp, Artificial sequence
  SiRNA target sequence
tgaagtatccataggaactaa

SEQ ID NO: 294601 - DNA, 21 bp, Artificial sequence
  SiRNA target sequence
gaagtatccataggaactaat

SEQ ID NO: 294602 - DNA, 21 bp, Artificial sequence
  SiRNA target sequence
aagtatccataggaactaatg

SEQ ID NO: 294603 - DNA, 21 bp, Artificial sequence
  SiRNA target sequence
agtatccataggaactaatgt

SEQ ID NO: 294604 - DNA, 21 bp, Artificial sequence
  SiRNA target sequence
gtatccataggaactaatgtt

SEQ ID NO: 294605 - DNA, 21 bp, Artificial sequence
  SiRNA target sequence
tatccataggaactaatgttt

SEQ ID NO: 294606 - DNA, 21 bp, Artificial sequence
  SiRNA target sequence
atccataggaactaatgttta

SEQ ID NO: 294607 - DNA, 21 bp, Artificial sequence
  SiRNA target sequence
tccataggaactaatgtttat

SEQ ID NO: 294608 - DNA, 21 bp, Artificial sequence
  SiRNA target sequence
ccataggaactaatgtttatt

SEQ ID NO: 294609 - DNA, 21 bp, Artificial sequence
  SiRNA target sequence
cataggaactaatgtttattc

SEQ ID NO: 294610 - DNA, 21 bp, Artificial sequence
  SiRNA target sequence
ataggaactaatgtttattcc

SEQ ID NO: 294611 - DNA, 21 bp, Artificial sequence
  SiRNA target sequence
taggaactaatgtttattccc

SEQ ID NO: 294612 - DNA, 21 bp, Artificial sequence
  SiRNA target sequence
aggaactaatgtttattccca

SEQ ID NO: 294613 - DNA, 21 bp, Artificial sequence
  SiRNA target sequence
ggaactaatgtttattcccaa

SEQ ID NO: 294614 - DNA, 21 bp, Artificial sequence
  SiRNA target sequence
gaactaatgtttattcccaag

SEQ ID NO: 294615 - DNA, 21 bp, Artificial sequence
  SiRNA target sequence
aactaatgtttattcccaaga

SEQ ID NO: 294616 - DNA, 21 bp, Artificial sequence
  SiRNA target sequence
actaatgtttattcccaagat

SEQ ID NO: 294617 - DNA, 21 bp, Artificial sequence
  SiRNA target sequence
ctaatgtttattcccaagatt

SEQ ID NO: 294618 - DNA, 21 bp, Artificial sequence
  SiRNA target sequence
taatgtttattcccaagattg

SEQ ID NO: 294619 - DNA, 21 bp, Artificial sequence
  SiRNA target sequence
aatgtttattcccaagattgg

SEQ ID NO: 294620 - DNA, 21 bp, Artificial sequence
  SiRNA target sequence
atgtttattcccaagattgga

SEQ ID NO: 294621 - DNA, 21 bp, Artificial sequence
  SiRNA target sequence
tgtttattcccaagattggaa

SEQ ID NO: 294622 - DNA, 21 bp, Artificial sequence
  SiRNA target sequence
gtttattcccaagattggaat

SEQ ID NO: 294623 - DNA, 21 bp, Artificial sequence
  SiRNA target sequence
tttattcccaagattggaata

SEQ ID NO: 294624 - DNA, 21 bp, Artificial sequence
  SiRNA target sequence
ttattcccaagattggaataa

SEQ ID NO: 294625 - DNA, 21 bp, Artificial sequence
  SiRNA target sequence
tattcccaagattggaataag

SEQ ID NO: 294626 - DNA, 21 bp, Artificial sequence
  SiRNA target sequence
attcccaagattggaataaga

SEQ ID NO: 294627 - DNA, 21 bp, Artificial sequence
  SiRNA target sequence
ttcccaagattggaataagac

SEQ ID NO: 294628 - DNA, 21 bp, Artificial sequence
  SiRNA target sequence
tcccaagattggaataagaca

SEQ ID NO: 294629 - DNA, 21 bp, Artificial sequence
  SiRNA target sequence
cccaagattggaataagacag

SEQ ID NO: 294630 - DNA, 21 bp, Artificial sequence
  SiRNA target sequence
ccaagattggaataagacagt

SEQ ID NO: 294631 - DNA, 21 bp, Artificial sequence
  SiRNA target sequence
caagattggaataagacagtt

SEQ ID NO: 294632 - DNA, 21 bp, Artificial sequence
  SiRNA target sequence
aagattggaataagacagtta

SEQ ID NO: 294633 - DNA, 21 bp, Artificial sequence
  SiRNA target sequence
agattggaataagacagttag

SEQ ID NO: 294634 - DNA, 21 bp, Artificial sequence
  SiRNA target sequence
gattggaataagacagttaga

SEQ ID NO: 294635 - DNA, 21 bp, Artificial sequence
  SiRNA target sequence
attggaataagacagttagaa

SEQ ID NO: 294636 - DNA, 21 bp, Artificial sequence
  SiRNA target sequence
ttggaataagacagttagaaa

SEQ ID NO: 294637 - DNA, 21 bp, Artificial sequence
  SiRNA target sequence
tggaataagacagttagaaaa

SEQ ID NO: 294638 - DNA, 21 bp, Artificial sequence
  SiRNA target sequence
ggaataagacagttagaaaac

SEQ ID NO: 294639 - DNA, 21 bp, Artificial sequence
  SiRNA target sequence
gaataagacagttagaaaact

SEQ ID NO: 294640 - DNA, 21 bp, Artificial sequence
  SiRNA target sequence
aataagacagttagaaaactt

SEQ ID NO: 294641 - DNA, 21 bp, Artificial sequence
  SiRNA target sequence
ataagacagttagaaaactta

SEQ ID NO: 294642 - DNA, 21 bp, Artificial sequence
  SiRNA target sequence
taagacagttagaaaacttaa

SEQ ID NO: 294643 - DNA, 21 bp, Artificial sequence
  SiRNA target sequence
aagacagttagaaaacttaaa

SEQ ID NO: 294644 - DNA, 21 bp, Artificial sequence
  SiRNA target sequence
agacagttagaaaacttaaaa

SEQ ID NO: 294645 - DNA, 21 bp, Artificial sequence
  SiRNA target sequence
gacagttagaaaacttaaaac

SEQ ID NO: 294646 - DNA, 21 bp, Artificial sequence
  SiRNA target sequence
acagttagaaaacttaaaact

SEQ ID NO: 294647 - DNA, 21 bp, Artificial sequence
  SiRNA target sequence
cagttagaaaacttaaaacta

SEQ ID NO: 294648 - DNA, 21 bp, Artificial sequence
  SiRNA target sequence
agttagaaaacttaaaactat

SEQ ID NO: 294649 - DNA, 21 bp, Artificial sequence
  SiRNA target sequence
gttagaaaacttaaaactatg

SEQ ID NO: 294650 - DNA, 21 bp, Artificial sequence
  SiRNA target sequence
ttagaaaacttaaaactatgg

SEQ ID NO: 294651 - DNA, 21 bp, Artificial sequence
  SiRNA target sequence
tagaaaacttaaaactatggg

SEQ ID NO: 294652 - DNA, 21 bp, Artificial sequence
  SiRNA target sequence
agaaaacttaaaactatggga

SEQ ID NO: 294653 - DNA, 21 bp, Artificial sequence
  SiRNA target sequence
gaaaacttaaaactatgggac

SEQ ID NO: 294654 - DNA, 21 bp, Artificial sequence
  SiRNA target sequence
aaaacttaaaactatgggacc

SEQ ID NO: 294655 - DNA, 21 bp, Artificial sequence
  SiRNA target sequence
aaacttaaaactatgggaccc

SEQ ID NO: 294656 - DNA, 21 bp, Artificial sequence
  SiRNA target sequence
aacttaaaactatgggaccca

SEQ ID NO: 294657 - DNA, 21 bp, Artificial sequence
  SiRNA target sequence
acttaaaactatgggacccaa

SEQ ID NO: 294658 - DNA, 21 bp, Artificial sequence
  SiRNA target sequence
cttaaaactatgggacccaag

SEQ ID NO: 294659 - DNA, 21 bp, Artificial sequence
  SiRNA target sequence
ttaaaactatgggacccaagg

SEQ ID NO: 294660 - DNA, 21 bp, Artificial sequence
  SiRNA target sequence
taaaactatgggacccaaggt

SEQ ID NO: 294661 - DNA, 21 bp, Artificial sequence
  SiRNA target sequence
aaaactatgggacccaaggtt

SEQ ID NO: 294662 - DNA, 21 bp, Artificial sequence
  SiRNA target sequence
aaactatgggacccaaggtta

SEQ ID NO: 294663 - DNA, 21 bp, Artificial sequence
  SiRNA target sequence
aactatgggacccaaggttat

SEQ ID NO: 294664 - DNA, 21 bp, Artificial sequence
  SiRNA target sequence
actatgggacccaaggttatt

SEQ ID NO: 294665 - DNA, 21 bp, Artificial sequence
  SiRNA target sequence
ctatgggacccaaggttattg

SEQ ID NO: 294666 - DNA, 21 bp, Artificial sequence
  SiRNA target sequence
tatgggacccaaggttattgc

SEQ ID NO: 294667 - DNA, 21 bp, Artificial sequence
  SiRNA target sequence
atgggacccaaggttattgca

SEQ ID NO: 294668 - DNA, 21 bp, Artificial sequence
  SiRNA target sequence
tgggacccaaggttattgcag

SEQ ID NO: 294669 - DNA, 21 bp, Artificial sequence
  SiRNA target sequence
gggacccaaggttattgcagg

SEQ ID NO: 294670 - DNA, 21 bp, Artificial sequence
  SiRNA target sequence
ggacccaaggttattgcagga

SEQ ID NO: 294671 - DNA, 21 bp, Artificial sequence
  SiRNA target sequence
gacccaaggttattgcaggag

SEQ ID NO: 294672 - DNA, 21 bp, Artificial sequence
  SiRNA target sequence
acccaaggttattgcaggaga

SEQ ID NO: 294673 - DNA, 21 bp, Artificial sequence
  SiRNA target sequence
cccaaggttattgcaggagat

SEQ ID NO: 294674 - DNA, 21 bp, Artificial sequence
  SiRNA target sequence
ccaaggttattgcaggagatt

SEQ ID NO: 294675 - DNA, 21 bp, Artificial sequence
  SiRNA target sequence
caaggttattgcaggagattt

SEQ ID NO: 294676 - DNA, 21 bp, Artificial sequence
  SiRNA target sequence
aaggttattgcaggagatttc

SEQ ID NO: 294677 - DNA, 21 bp, Artificial sequence
  SiRNA target sequence
aggttattgcaggagatttct

SEQ ID NO: 294678 - DNA, 21 bp, Artificial sequence
  SiRNA target sequence
ggttattgcaggagatttctc

SEQ ID NO: 294679 - DNA, 21 bp, Artificial sequence
  SiRNA target sequence
gttattgcaggagatttctca

SEQ ID NO: 294680 - DNA, 21 bp, Artificial sequence
  SiRNA target sequence
ttattgcaggagatttctcaa

SEQ ID NO: 294681 - DNA, 21 bp, Artificial sequence
  SiRNA target sequence
tattgcaggagatttctcaac

SEQ ID NO: 294682 - DNA, 21 bp, Artificial sequence
  SiRNA target sequence
attgcaggagatttctcaacc

SEQ ID NO: 294683 - DNA, 21 bp, Artificial sequence
  SiRNA target sequence
ttgcaggagatttctcaacct

SEQ ID NO: 294684 - DNA, 21 bp, Artificial sequence
  SiRNA target sequence
tgcaggagatttctcaacctt

SEQ ID NO: 294685 - DNA, 21 bp, Artificial sequence
  SiRNA target sequence
gcaggagatttctcaaccttt

SEQ ID NO: 294686 - DNA, 21 bp, Artificial sequence
  SiRNA target sequence
caggagatttctcaacctttg

SEQ ID NO: 294687 - DNA, 21 bp, Artificial sequence
  SiRNA target sequence
aggagatttctcaacctttga

SEQ ID NO: 294688 - DNA, 21 bp, Artificial sequence
  SiRNA target sequence
ggagatttctcaacctttgat

SEQ ID NO: 294689 - DNA, 21 bp, Artificial sequence
  SiRNA target sequence
gagatttctcaacctttgatg

SEQ ID NO: 294690 - DNA, 21 bp, Artificial sequence
  SiRNA target sequence
agatttctcaacctttgatgg

SEQ ID NO: 294691 - DNA, 21 bp, Artificial sequence
  SiRNA target sequence
gatttctcaacctttgatgga

SEQ ID NO: 294692 - DNA, 21 bp, Artificial sequence
  SiRNA target sequence
atttctcaacctttgatggat

SEQ ID NO: 294693 - DNA, 21 bp, Artificial sequence
  SiRNA target sequence
tttctcaacctttgatggatc

SEQ ID NO: 294694 - DNA, 21 bp, Artificial sequence
  SiRNA target sequence
ttctcaacctttgatggatct

SEQ ID NO: 294695 - DNA, 21 bp, Artificial sequence
  SiRNA target sequence
tctcaacctttgatggatctt

SEQ ID NO: 294696 - DNA, 21 bp, Artificial sequence
  SiRNA target sequence
ctcaacctttgatggatcttt

SEQ ID NO: 294697 - DNA, 21 bp, Artificial sequence
  SiRNA target sequence
tcaacctttgatggatctttg

SEQ ID NO: 294698 - DNA, 21 bp, Artificial sequence
  SiRNA target sequence
caacctttgatggatctttga

SEQ ID NO: 294699 - DNA, 21 bp, Artificial sequence
  SiRNA target sequence
aacctttgatggatctttgaa

SEQ ID NO: 294700 - DNA, 21 bp, Artificial sequence
  SiRNA target sequence
acctttgatggatctttgaat

SEQ ID NO: 294701 - DNA, 21 bp, Artificial sequence
  SiRNA target sequence
cctttgatggatctttgaatg

SEQ ID NO: 294702 - DNA, 21 bp, Artificial sequence
  SiRNA target sequence
ctttgatggatctttgaatgt

SEQ ID NO: 294703 - DNA, 21 bp, Artificial sequence
  SiRNA target sequence
tttgatggatctttgaatgtt

SEQ ID NO: 294704 - DNA, 21 bp, Artificial sequence
  SiRNA target sequence
ttgatggatctttgaatgttt

SEQ ID NO: 294705 - DNA, 21 bp, Artificial sequence
  SiRNA target sequence
tgatggatctttgaatgtttg

SEQ ID NO: 294706 - DNA, 21 bp, Artificial sequence
  SiRNA target sequence
gatggatctttgaatgtttgc

SEQ ID NO: 294707 - DNA, 21 bp, Artificial sequence
  SiRNA target sequence
atggatctttgaatgtttgca

SEQ ID NO: 294708 - DNA, 21 bp, Artificial sequence
  SiRNA target sequence
tggatctttgaatgtttgcat

SEQ ID NO: 294709 - DNA, 21 bp, Artificial sequence
  SiRNA target sequence
ggatctttgaatgtttgcatt

SEQ ID NO: 294710 - DNA, 21 bp, Artificial sequence
  SiRNA target sequence
gatctttgaatgtttgcatta

SEQ ID NO: 294711 - DNA, 21 bp, Artificial sequence
  SiRNA target sequence
atctttgaatgtttgcattat

SEQ ID NO: 294712 - DNA, 21 bp, Artificial sequence
  SiRNA target sequence
tctttgaatgtttgcattatg

SEQ ID NO: 294713 - DNA, 21 bp, Artificial sequence
  SiRNA target sequence
ctttgaatgtttgcattatgg

SEQ ID NO: 294714 - DNA, 21 bp, Artificial sequence
  SiRNA target sequence
tttgaatgtttgcattatgga

SEQ ID NO: 294715 - DNA, 21 bp, Artificial sequence
  SiRNA target sequence
ttgaatgtttgcattatggaa

SEQ ID NO: 294716 - DNA, 21 bp, Artificial sequence
  SiRNA target sequence
tgaatgtttgcattatggaaa

SEQ ID NO: 294717 - DNA, 21 bp, Artificial sequence
  SiRNA target sequence
gaatgtttgcattatggaaaa

SEQ ID NO: 294718 - DNA, 21 bp, Artificial sequence
  SiRNA target sequence
aatgtttgcattatggaaaaa

SEQ ID NO: 294719 - DNA, 21 bp, Artificial sequence
  SiRNA target sequence
atgtttgcattatggaaaaat

SEQ ID NO: 294720 - DNA, 21 bp, Artificial sequence
  SiRNA target sequence
tgtttgcattatggaaaaatt

SEQ ID NO: 294721 - DNA, 21 bp, Artificial sequence
  SiRNA target sequence
gtttgcattatggaaaaattt

SEQ ID NO: 294722 - DNA, 21 bp, Artificial sequence
  SiRNA target sequence
tttgcattatggaaaaatttg

SEQ ID NO: 294723 - DNA, 21 bp, Artificial sequence
  SiRNA target sequence
ttgcattatggaaaaatttgc

SEQ ID NO: 294724 - DNA, 21 bp, Artificial sequence
  SiRNA target sequence
tgcattatggaaaaatttgct

SEQ ID NO: 294725 - DNA, 21 bp, Artificial sequence
  SiRNA target sequence
gcattatggaaaaatttgctg

SEQ ID NO: 294726 - DNA, 21 bp, Artificial sequence
  SiRNA target sequence
cattatggaaaaatttgctga

SEQ ID NO: 294727 - DNA, 21 bp, Artificial sequence
  SiRNA target sequence
attatggaaaaatttgctgac

SEQ ID NO: 294728 - DNA, 21 bp, Artificial sequence
  SiRNA target sequence
ttatggaaaaatttgctgacc

SEQ ID NO: 294729 - DNA, 21 bp, Artificial sequence
  SiRNA target sequence
tatggaaaaatttgctgacct

SEQ ID NO: 294730 - DNA, 21 bp, Artificial sequence
  SiRNA target sequence
atggaaaaatttgctgaccta

SEQ ID NO: 294731 - DNA, 21 bp, Artificial sequence
  SiRNA target sequence
tggaaaaatttgctgacctag

SEQ ID NO: 294732 - DNA, 21 bp, Artificial sequence
  SiRNA target sequence
ggaaaaatttgctgacctagc

SEQ ID NO: 294733 - DNA, 21 bp, Artificial sequence
  SiRNA target sequence
gaaaaatttgctgacctagcg

SEQ ID NO: 294734 - DNA, 21 bp, Artificial sequence
  SiRNA target sequence
aaaaatttgctgacctagcga

SEQ ID NO: 294735 - DNA, 21 bp, Artificial sequence
  SiRNA target sequence
aaaatttgctgacctagcgaa

SEQ ID NO: 294736 - DNA, 21 bp, Artificial sequence
  SiRNA target sequence
aaatttgctgacctagcgaat

SEQ ID NO: 294737 - DNA, 21 bp, Artificial sequence
  SiRNA target sequence
aatttgctgacctagcgaatg

SEQ ID NO: 294738 - DNA, 21 bp, Artificial sequence
  SiRNA target sequence
atttgctgacctagcgaatga

SEQ ID NO: 294739 - DNA, 21 bp, Artificial sequence
  SiRNA target sequence
tttgctgacctagcgaatgaa

SEQ ID NO: 294740 - DNA, 21 bp, Artificial sequence
  SiRNA target sequence
ttgctgacctagcgaatgaat

SEQ ID NO: 294741 - DNA, 21 bp, Artificial sequence
  SiRNA target sequence
tgctgacctagcgaatgaatt

SEQ ID NO: 294742 - DNA, 21 bp, Artificial sequence
  SiRNA target sequence
gctgacctagcgaatgaattt

SEQ ID NO: 294743 - DNA, 21 bp, Artificial sequence
  SiRNA target sequence
ctgacctagcgaatgaatttt

SEQ ID NO: 294744 - DNA, 21 bp, Artificial sequence
  SiRNA target sequence
tgacctagcgaatgaatttta

SEQ ID NO: 294745 - DNA, 21 bp, Artificial sequence
  SiRNA target sequence
gacctagcgaatgaattttat

SEQ ID NO: 294746 - DNA, 21 bp, Artificial sequence
  SiRNA target sequence
acctagcgaatgaattttatg

SEQ ID NO: 294747 - DNA, 21 bp, Artificial sequence
  SiRNA target sequence
cctagcgaatgaattttatga

SEQ ID NO: 294748 - DNA, 21 bp, Artificial sequence
  SiRNA target sequence
ctagcgaatgaattttatgat

SEQ ID NO: 294749 - DNA, 21 bp, Artificial sequence
  SiRNA target sequence
tagcgaatgaattttatgatg

SEQ ID NO: 294750 - DNA, 21 bp, Artificial sequence
  SiRNA target sequence
agcgaatgaattttatgatga

SEQ ID NO: 294751 - DNA, 21 bp, Artificial sequence
  SiRNA target sequence
gcgaatgaattttatgatgac

SEQ ID NO: 294752 - DNA, 21 bp, Artificial sequence
  SiRNA target sequence
cgaatgaattttatgatgacg

SEQ ID NO: 294753 - DNA, 21 bp, Artificial sequence
  SiRNA target sequence
gaatgaattttatgatgacgg

SEQ ID NO: 294754 - DNA, 21 bp, Artificial sequence
  SiRNA target sequence
aatgaattttatgatgacgga

SEQ ID NO: 294755 - DNA, 21 bp, Artificial sequence
  SiRNA target sequence
atgaattttatgatgacggat

SEQ ID NO: 294756 - DNA, 21 bp, Artificial sequence
  SiRNA target sequence
tgaattttatgatgacggatc

SEQ ID NO: 294757 - DNA, 21 bp, Artificial sequence
  SiRNA target sequence
gaattttatgatgacggatca

SEQ ID NO: 294758 - DNA, 21 bp, Artificial sequence
  SiRNA target sequence
aattttatgatgacggatcag

SEQ ID NO: 294759 - DNA, 21 bp, Artificial sequence
  SiRNA target sequence
attttatgatgacggatcaga

SEQ ID NO: 294760 - DNA, 21 bp, Artificial sequence
  SiRNA target sequence
ttttatgatgacggatcagag

SEQ ID NO: 294761 - DNA, 21 bp, Artificial sequence
  SiRNA target sequence
tttatgatgacggatcagaga

SEQ ID NO: 294762 - DNA, 21 bp, Artificial sequence
  SiRNA target sequence
ttatgatgacggatcagagaa

SEQ ID NO: 294763 - DNA, 21 bp, Artificial sequence
  SiRNA target sequence
tatgatgacggatcagagaat

SEQ ID NO: 294764 - DNA, 21 bp, Artificial sequence
  SiRNA target sequence
atgatgacggatcagagaatg

SEQ ID NO: 294765 - DNA, 21 bp, Artificial sequence
  SiRNA target sequence
tgatgacggatcagagaatgc

SEQ ID NO: 294766 - DNA, 21 bp, Artificial sequence
  SiRNA target sequence
gatgacggatcagagaatgca

SEQ ID NO: 294767 - DNA, 21 bp, Artificial sequence
  SiRNA target sequence
atgacggatcagagaatgcat

SEQ ID NO: 294768 - DNA, 21 bp, Artificial sequence
  SiRNA target sequence
tgacggatcagagaatgcatt

SEQ ID NO: 294769 - DNA, 21 bp, Artificial sequence
  SiRNA target sequence
gacggatcagagaatgcatta

SEQ ID NO: 294770 - DNA, 21 bp, Artificial sequence
  SiRNA target sequence
acggatcagagaatgcattaa

SEQ ID NO: 294771 - DNA, 21 bp, Artificial sequence
  SiRNA target sequence
cggatcagagaatgcattaat

SEQ ID NO: 294772 - DNA, 21 bp, Artificial sequence
  SiRNA target sequence
ggatcagagaatgcattaatt

SEQ ID NO: 294773 - DNA, 21 bp, Artificial sequence
  SiRNA target sequence
gatcagagaatgcattaattc

SEQ ID NO: 294774 - DNA, 21 bp, Artificial sequence
  SiRNA target sequence
atcagagaatgcattaattcg

SEQ ID NO: 294775 - DNA, 21 bp, Artificial sequence
  SiRNA target sequence
tcagagaatgcattaattcga

SEQ ID NO: 294776 - DNA, 21 bp, Artificial sequence
  SiRNA target sequence
cagagaatgcattaattcgac

SEQ ID NO: 294777 - DNA, 21 bp, Artificial sequence
  SiRNA target sequence
agagaatgcattaattcgaca

SEQ ID NO: 294778 - DNA, 21 bp, Artificial sequence
  SiRNA target sequence
gagaatgcattaattcgacat

SEQ ID NO: 294779 - DNA, 21 bp, Artificial sequence
  SiRNA target sequence
agaatgcattaattcgacatg

SEQ ID NO: 294780 - DNA, 21 bp, Artificial sequence
  SiRNA target sequence
gaatgcattaattcgacatgt

SEQ ID NO: 294781 - DNA, 21 bp, Artificial sequence
  SiRNA target sequence
aatgcattaattcgacatgtt

SEQ ID NO: 294782 - DNA, 21 bp, Artificial sequence
  SiRNA target sequence
atgcattaattcgacatgttt

SEQ ID NO: 294783 - DNA, 21 bp, Artificial sequence
  SiRNA target sequence
tgcattaattcgacatgtttt

SEQ ID NO: 294784 - DNA, 21 bp, Artificial sequence
  SiRNA target sequence
gcattaattcgacatgttttg

SEQ ID NO: 294785 - DNA, 21 bp, Artificial sequence
  SiRNA target sequence
cattaattcgacatgttttgc

SEQ ID NO: 294786 - DNA, 21 bp, Artificial sequence
  SiRNA target sequence
attaattcgacatgttttgct

SEQ ID NO: 294787 - DNA, 21 bp, Artificial sequence
  SiRNA target sequence
ttaattcgacatgttttgctt

SEQ ID NO: 294788 - DNA, 21 bp, Artificial sequence
  SiRNA target sequence
taattcgacatgttttgctta

SEQ ID NO: 294789 - DNA, 21 bp, Artificial sequence
  SiRNA target sequence
aattcgacatgttttgcttat

SEQ ID NO: 294790 - DNA, 21 bp, Artificial sequence
  SiRNA target sequence
attcgacatgttttgcttatg

SEQ ID NO: 294791 - DNA, 21 bp, Artificial sequence
  SiRNA target sequence
ttcgacatgttttgcttatgg

SEQ ID NO: 294792 - DNA, 21 bp, Artificial sequence
  SiRNA target sequence
tcgacatgttttgcttatgga

SEQ ID NO: 294793 - DNA, 21 bp, Artificial sequence
  SiRNA target sequence
cgacatgttttgcttatggat

SEQ ID NO: 294794 - DNA, 21 bp, Artificial sequence
  SiRNA target sequence
gacatgttttgcttatggatg

SEQ ID NO: 294795 - DNA, 21 bp, Artificial sequence
  SiRNA target sequence
acatgttttgcttatggatgt

SEQ ID NO: 294796 - DNA, 21 bp, Artificial sequence
  SiRNA target sequence
catgttttgcttatggatgta

SEQ ID NO: 294797 - DNA, 21 bp, Artificial sequence
  SiRNA target sequence
atgttttgcttatggatgtat

SEQ ID NO: 294798 - DNA, 21 bp, Artificial sequence
  SiRNA target sequence
tgttttgcttatggatgtata

SEQ ID NO: 294799 - DNA, 21 bp, Artificial sequence
  SiRNA target sequence
gttttgcttatggatgtatat

SEQ ID NO: 294800 - DNA, 21 bp, Artificial sequence
  SiRNA target sequence
ttttgcttatggatgtatata

SEQ ID NO: 294801 - DNA, 21 bp, Artificial sequence
  SiRNA target sequence
tttgcttatggatgtatataa

SEQ ID NO: 294802 - DNA, 21 bp, Artificial sequence
  SiRNA target sequence
ttgcttatggatgtatataac

SEQ ID NO: 294803 - DNA, 21 bp, Artificial sequence
  SiRNA target sequence
tgcttatggatgtatataact

SEQ ID NO: 294804 - DNA, 21 bp, Artificial sequence
  SiRNA target sequence
gcttatggatgtatataactc

SEQ ID NO: 294805 - DNA, 21 bp, Artificial sequence
  SiRNA target sequence
cttatggatgtatataactca

SEQ ID NO: 294806 - DNA, 21 bp, Artificial sequence
  SiRNA target sequence
ttatggatgtatataactcaa

SEQ ID NO: 294807 - DNA, 21 bp, Artificial sequence
  SiRNA target sequence
tatggatgtatataactcaac

SEQ ID NO: 294808 - DNA, 21 bp, Artificial sequence
  SiRNA target sequence
atggatgtatataactcaaca

SEQ ID NO: 294809 - DNA, 21 bp, Artificial sequence
  SiRNA target sequence
tggatgtatataactcaacac

SEQ ID NO: 294810 - DNA, 21 bp, Artificial sequence
  SiRNA target sequence
ggatgtatataactcaacaca

SEQ ID NO: 294811 - DNA, 21 bp, Artificial sequence
  SiRNA target sequence
gatgtatataactcaacacac

SEQ ID NO: 294812 - DNA, 21 bp, Artificial sequence
  SiRNA target sequence
atgtatataactcaacacaca

SEQ ID NO: 294813 - DNA, 21 bp, Artificial sequence
  SiRNA target sequence
tgtatataactcaacacacat

SEQ ID NO: 294814 - DNA, 21 bp, Artificial sequence
  SiRNA target sequence
gtatataactcaacacacatt

SEQ ID NO: 294815 - DNA, 21 bp, Artificial sequence
  SiRNA target sequence
tatataactcaacacacattt

SEQ ID NO: 294816 - DNA, 21 bp, Artificial sequence
  SiRNA target sequence
atataactcaacacacatttg

SEQ ID NO: 294817 - DNA, 21 bp, Artificial sequence
  SiRNA target sequence
tataactcaacacacatttgt

SEQ ID NO: 294818 - DNA, 21 bp, Artificial sequence
  SiRNA target sequence
ataactcaacacacatttgtg

SEQ ID NO: 294819 - DNA, 21 bp, Artificial sequence
  SiRNA target sequence
taactcaacacacatttgtgg

SEQ ID NO: 294820 - DNA, 21 bp, Artificial sequence
  SiRNA target sequence
aactcaacacacatttgtggt

SEQ ID NO: 294821 - DNA, 21 bp, Artificial sequence
  SiRNA target sequence
actcaacacacatttgtggtg

SEQ ID NO: 294822 - DNA, 21 bp, Artificial sequence
  SiRNA target sequence
ctcaacacacatttgtggtga

SEQ ID NO: 294823 - DNA, 21 bp, Artificial sequence
  SiRNA target sequence
tcaacacacatttgtggtgat

SEQ ID NO: 294824 - DNA, 21 bp, Artificial sequence
  SiRNA target sequence
caacacacatttgtggtgatt

SEQ ID NO: 294825 - DNA, 21 bp, Artificial sequence
  SiRNA target sequence
aacacacatttgtggtgattc

SEQ ID NO: 294826 - DNA, 21 bp, Artificial sequence
  SiRNA target sequence
acacacatttgtggtgattcc

SEQ ID NO: 294827 - DNA, 21 bp, Artificial sequence
  SiRNA target sequence
cacacatttgtggtgattccg

SEQ ID NO: 294828 - DNA, 21 bp, Artificial sequence
  SiRNA target sequence
acacatttgtggtgattccgt

SEQ ID NO: 294829 - DNA, 21 bp, Artificial sequence
  SiRNA target sequence
cacatttgtggtgattccgta

SEQ ID NO: 294830 - DNA, 21 bp, Artificial sequence
  SiRNA target sequence
acatttgtggtgattccgtat

SEQ ID NO: 294831 - DNA, 21 bp, Artificial sequence
  SiRNA target sequence
catttgtggtgattccgtata

SEQ ID NO: 294832 - DNA, 21 bp, Artificial sequence
  SiRNA target sequence
atttgtggtgattccgtatat

SEQ ID NO: 294833 - DNA, 21 bp, Artificial sequence
  SiRNA target sequence
tttgtggtgattccgtatata

SEQ ID NO: 294834 - DNA, 21 bp, Artificial sequence
  SiRNA target sequence
ttgtggtgattccgtatatat

SEQ ID NO: 294835 - DNA, 21 bp, Artificial sequence
  SiRNA target sequence
tgtggtgattccgtatatatg

SEQ ID NO: 294836 - DNA, 21 bp, Artificial sequence
  SiRNA target sequence
gtggtgattccgtatatatga

SEQ ID NO: 294837 - DNA, 21 bp, Artificial sequence
  SiRNA target sequence
tggtgattccgtatatatgat

SEQ ID NO: 294838 - DNA, 21 bp, Artificial sequence
  SiRNA target sequence
ggtgattccgtatatatgatg

SEQ ID NO: 294839 - DNA, 21 bp, Artificial sequence
  SiRNA target sequence
gtgattccgtatatatgatga

SEQ ID NO: 294840 - DNA, 21 bp, Artificial sequence
  SiRNA target sequence
tgattccgtatatatgatgac

SEQ ID NO: 294841 - DNA, 21 bp, Artificial sequence
  SiRNA target sequence
gattccgtatatatgatgaca

SEQ ID NO: 294842 - DNA, 21 bp, Artificial sequence
  SiRNA target sequence
attccgtatatatgatgacac

SEQ ID NO: 294843 - DNA, 21 bp, Artificial sequence
  SiRNA target sequence
ttccgtatatatgatgacaca

SEQ ID NO: 294844 - DNA, 21 bp, Artificial sequence
  SiRNA target sequence
tccgtatatatgatgacacac

SEQ ID NO: 294845 - DNA, 21 bp, Artificial sequence
  SiRNA target sequence
ccgtatatatgatgacacaca

SEQ ID NO: 294846 - DNA, 21 bp, Artificial sequence
  SiRNA target sequence
cgtatatatgatgacacacag

SEQ ID NO: 294847 - DNA, 21 bp, Artificial sequence
  SiRNA target sequence
gtatatatgatgacacacagt

SEQ ID NO: 294848 - DNA, 21 bp, Artificial sequence
  SiRNA target sequence
tatatatgatgacacacagtc

SEQ ID NO: 294849 - DNA, 21 bp, Artificial sequence
  SiRNA target sequence
atatatgatgacacacagtca

SEQ ID NO: 294850 - DNA, 21 bp, Artificial sequence
  SiRNA target sequence
tatatgatgacacacagtcaa

SEQ ID NO: 294851 - DNA, 21 bp, Artificial sequence
  SiRNA target sequence
atatgatgacacacagtcaac

SEQ ID NO: 294852 - DNA, 21 bp, Artificial sequence
  SiRNA target sequence
tatgatgacacacagtcaacc

SEQ ID NO: 294853 - DNA, 21 bp, Artificial sequence
  SiRNA target sequence
atgatgacacacagtcaaccc

SEQ ID NO: 294854 - DNA, 21 bp, Artificial sequence
  SiRNA target sequence
tgatgacacacagtcaaccct

SEQ ID NO: 294855 - DNA, 21 bp, Artificial sequence
  SiRNA target sequence
gatgacacacagtcaaccctc

SEQ ID NO: 294856 - DNA, 21 bp, Artificial sequence
  SiRNA target sequence
atgacacacagtcaaccctct

SEQ ID NO: 294857 - DNA, 21 bp, Artificial sequence
  SiRNA target sequence
tgacacacagtcaaccctctg

SEQ ID NO: 294858 - DNA, 21 bp, Artificial sequence
  SiRNA target sequence
gacacacagtcaaccctctgg

SEQ ID NO: 294859 - DNA, 21 bp, Artificial sequence
  SiRNA target sequence
acacacagtcaaccctctggt

SEQ ID NO: 294860 - DNA, 21 bp, Artificial sequence
  SiRNA target sequence
cacacagtcaaccctctggta

SEQ ID NO: 294861 - DNA, 21 bp, Artificial sequence
  SiRNA target sequence
acacagtcaaccctctggtaa

SEQ ID NO: 294862 - DNA, 21 bp, Artificial sequence
  SiRNA target sequence
cacagtcaaccctctggtaat

SEQ ID NO: 294863 - DNA, 21 bp, Artificial sequence
  SiRNA target sequence
acagtcaaccctctggtaatc

SEQ ID NO: 294864 - DNA, 21 bp, Artificial sequence
  SiRNA target sequence
cagtcaaccctctggtaatcc

SEQ ID NO: 294865 - DNA, 21 bp, Artificial sequence
  SiRNA target sequence
agtcaaccctctggtaatccg

SEQ ID NO: 294866 - DNA, 21 bp, Artificial sequence
  SiRNA target sequence
gtcaaccctctggtaatccgg

SEQ ID NO: 294867 - DNA, 21 bp, Artificial sequence
  SiRNA target sequence
tcaaccctctggtaatccggc

SEQ ID NO: 294868 - DNA, 21 bp, Artificial sequence
  SiRNA target sequence
caaccctctggtaatccggca

SEQ ID NO: 294869 - DNA, 21 bp, Artificial sequence
  SiRNA target sequence
aaccctctggtaatccggcaa

SEQ ID NO: 294870 - DNA, 21 bp, Artificial sequence
  SiRNA target sequence
accctctggtaatccggcaac

SEQ ID NO: 294871 - DNA, 21 bp, Artificial sequence
  SiRNA target sequence
ccctctggtaatccggcaaca

SEQ ID NO: 294872 - DNA, 21 bp, Artificial sequence
  SiRNA target sequence
cctctggtaatccggcaacaa

SEQ ID NO: 294873 - DNA, 21 bp, Artificial sequence
  SiRNA target sequence
ctctggtaatccggcaacaac

SEQ ID NO: 294874 - DNA, 21 bp, Artificial sequence
  SiRNA target sequence
tctggtaatccggcaacaaca

SEQ ID NO: 294875 - DNA, 21 bp, Artificial sequence
  SiRNA target sequence
ctggtaatccggcaacaacac

SEQ ID NO: 294876 - DNA, 21 bp, Artificial sequence
  SiRNA target sequence
tggtaatccggcaacaacacc

SEQ ID NO: 294877 - DNA, 21 bp, Artificial sequence
  SiRNA target sequence
ggtaatccggcaacaacacct

SEQ ID NO: 294878 - DNA, 21 bp, Artificial sequence
  SiRNA target sequence
gtaatccggcaacaacacctc

SEQ ID NO: 294879 - DNA, 21 bp, Artificial sequence
  SiRNA target sequence
taatccggcaacaacacctct

SEQ ID NO: 294880 - DNA, 21 bp, Artificial sequence
  SiRNA target sequence
aatccggcaacaacacctcta

SEQ ID NO: 294881 - DNA, 21 bp, Artificial sequence
  SiRNA target sequence
atccggcaacaacacctctaa

SEQ ID NO: 294882 - DNA, 21 bp, Artificial sequence
  SiRNA target sequence
tccggcaacaacacctctaaa

SEQ ID NO: 294883 - DNA, 21 bp, Artificial sequence
  SiRNA target sequence
ccggcaacaacacctctaaat

SEQ ID NO: 294884 - DNA, 21 bp, Artificial sequence
  SiRNA target sequence
cggcaacaacacctctaaatt

SEQ ID NO: 294885 - DNA, 21 bp, Artificial sequence
  SiRNA target sequence
ggcaacaacacctctaaattg

SEQ ID NO: 294886 - DNA, 21 bp, Artificial sequence
  SiRNA target sequence
gcaacaacacctctaaattgt

SEQ ID NO: 294887 - DNA, 21 bp, Artificial sequence
  SiRNA target sequence
caacaacacctctaaattgtt

SEQ ID NO: 294888 - DNA, 21 bp, Artificial sequence
  SiRNA target sequence
aacaacacctctaaattgttt

SEQ ID NO: 294889 - DNA, 21 bp, Artificial sequence
  SiRNA target sequence
acaacacctctaaattgtttc

SEQ ID NO: 294890 - DNA, 21 bp, Artificial sequence
  SiRNA target sequence
caacacctctaaattgtttca

SEQ ID NO: 294891 - DNA, 21 bp, Artificial sequence
  SiRNA target sequence
aacacctctaaattgtttcat

SEQ ID NO: 294892 - DNA, 21 bp, Artificial sequence
  SiRNA target sequence
acacctctaaattgtttcata

SEQ ID NO: 294893 - DNA, 21 bp, Artificial sequence
  SiRNA target sequence
cacctctaaattgtttcataa

SEQ ID NO: 294894 - DNA, 21 bp, Artificial sequence
  SiRNA target sequence
acctctaaattgtttcataaa

SEQ ID NO: 294895 - DNA, 21 bp, Artificial sequence
  SiRNA target sequence
cctctaaattgtttcataaac

SEQ ID NO: 294896 - DNA, 21 bp, Artificial sequence
  SiRNA target sequence
ctctaaattgtttcataaaca

SEQ ID NO: 294897 - DNA, 21 bp, Artificial sequence
  SiRNA target sequence
tctaaattgtttcataaacag

SEQ ID NO: 294898 - DNA, 21 bp, Artificial sequence
  SiRNA target sequence
ctaaattgtttcataaacagt

SEQ ID NO: 294899 - DNA, 21 bp, Artificial sequence
  SiRNA target sequence
taaattgtttcataaacagta

SEQ ID NO: 294900 - DNA, 21 bp, Artificial sequence
  SiRNA target sequence
aaattgtttcataaacagtat

SEQ ID NO: 294901 - DNA, 21 bp, Artificial sequence
  SiRNA target sequence
aattgtttcataaacagtatg

SEQ ID NO: 294902 - DNA, 21 bp, Artificial sequence
  SiRNA target sequence
attgtttcataaacagtatgg

SEQ ID NO: 294903 - DNA, 21 bp, Artificial sequence
  SiRNA target sequence
ttgtttcataaacagtatggg

SEQ ID NO: 294904 - DNA, 21 bp, Artificial sequence
  SiRNA target sequence
tgtttcataaacagtatgggc

SEQ ID NO: 294905 - DNA, 21 bp, Artificial sequence
  SiRNA target sequence
gtttcataaacagtatgggct

SEQ ID NO: 294906 - DNA, 21 bp, Artificial sequence
  SiRNA target sequence
tttcataaacagtatgggctt

SEQ ID NO: 294907 - DNA, 21 bp, Artificial sequence
  SiRNA target sequence
ttcataaacagtatgggcttg

SEQ ID NO: 294908 - DNA, 21 bp, Artificial sequence
  SiRNA target sequence
tcataaacagtatgggcttgc

SEQ ID NO: 294909 - DNA, 21 bp, Artificial sequence
  SiRNA target sequence
cataaacagtatgggcttgcg

SEQ ID NO: 294910 - DNA, 21 bp, Artificial sequence
  SiRNA target sequence
ataaacagtatgggcttgcga

SEQ ID NO: 294911 - DNA, 21 bp, Artificial sequence
  SiRNA target sequence
taaacagtatgggcttgcgaa

SEQ ID NO: 294912 - DNA, 21 bp, Artificial sequence
  SiRNA target sequence
aaacagtatgggcttgcgaat

SEQ ID NO: 294913 - DNA, 21 bp, Artificial sequence
  SiRNA target sequence
aacagtatgggcttgcgaatg

SEQ ID NO: 294914 - DNA, 21 bp, Artificial sequence
  SiRNA target sequence
acagtatgggcttgcgaatgg

SEQ ID NO: 294915 - DNA, 21 bp, Artificial sequence
  SiRNA target sequence
cagtatgggcttgcgaatggt

SEQ ID NO: 294916 - DNA, 21 bp, Artificial sequence
  SiRNA target sequence
agtatgggcttgcgaatggtc

SEQ ID NO: 294917 - DNA, 21 bp, Artificial sequence
  SiRNA target sequence
gtatgggcttgcgaatggtct

SEQ ID NO: 294918 - DNA, 21 bp, Artificial sequence
  SiRNA target sequence
tatgggcttgcgaatggtctt

SEQ ID NO: 294919 - DNA, 21 bp, Artificial sequence
  SiRNA target sequence
atgggcttgcgaatggtcttt

SEQ ID NO: 294920 - DNA, 21 bp, Artificial sequence
  SiRNA target sequence
tgggcttgcgaatggtctttg

SEQ ID NO: 294921 - DNA, 21 bp, Artificial sequence
  SiRNA target sequence
gggcttgcgaatggtctttga

SEQ ID NO: 294922 - DNA, 21 bp, Artificial sequence
  SiRNA target sequence
ggcttgcgaatggtctttgaa

SEQ ID NO: 294923 - DNA, 21 bp, Artificial sequence
  SiRNA target sequence
gcttgcgaatggtctttgaac

SEQ ID NO: 294924 - DNA, 21 bp, Artificial sequence
  SiRNA target sequence
cttgcgaatggtctttgaact

SEQ ID NO: 294925 - DNA, 21 bp, Artificial sequence
  SiRNA target sequence
ttgcgaatggtctttgaactt

SEQ ID NO: 294926 - DNA, 21 bp, Artificial sequence
  SiRNA target sequence
tgcgaatggtctttgaacttt

SEQ ID NO: 294927 - DNA, 21 bp, Artificial sequence
  SiRNA target sequence
gcgaatggtctttgaactttg

SEQ ID NO: 294928 - DNA, 21 bp, Artificial sequence
  SiRNA target sequence
cgaatggtctttgaactttgt

SEQ ID NO: 294929 - DNA, 21 bp, Artificial sequence
  SiRNA target sequence
gaatggtctttgaactttgtt

SEQ ID NO: 294930 - DNA, 21 bp, Artificial sequence
  SiRNA target sequence
aatggtctttgaactttgttc

SEQ ID NO: 294931 - DNA, 21 bp, Artificial sequence
  SiRNA target sequence
atggtctttgaactttgttca

SEQ ID NO: 294932 - DNA, 21 bp, Artificial sequence
  SiRNA target sequence
tggtctttgaactttgttcaa

SEQ ID NO: 294933 - DNA, 21 bp, Artificial sequence
  SiRNA target sequence
ggtctttgaactttgttcaaa

SEQ ID NO: 294934 - DNA, 21 bp, Artificial sequence
  SiRNA target sequence
gtctttgaactttgttcaaag

SEQ ID NO: 294935 - DNA, 21 bp, Artificial sequence
  SiRNA target sequence
tctttgaactttgttcaaaga

SEQ ID NO: 294936 - DNA, 21 bp, Artificial sequence
  SiRNA target sequence
ctttgaactttgttcaaagaa

SEQ ID NO: 294937 - DNA, 21 bp, Artificial sequence
  SiRNA target sequence
tttgaactttgttcaaagaaa

SEQ ID NO: 294938 - DNA, 21 bp, Artificial sequence
  SiRNA target sequence
ttgaactttgttcaaagaaat

SEQ ID NO: 294939 - DNA, 21 bp, Artificial sequence
  SiRNA target sequence
tgaactttgttcaaagaaata

SEQ ID NO: 294940 - DNA, 21 bp, Artificial sequence
  SiRNA target sequence
gaactttgttcaaagaaatat

SEQ ID NO: 294941 - DNA, 21 bp, Artificial sequence
  SiRNA target sequence
aactttgttcaaagaaatatt

SEQ ID NO: 294942 - DNA, 21 bp, Artificial sequence
  SiRNA target sequence
actttgttcaaagaaatattc

SEQ ID NO: 294943 - DNA, 21 bp, Artificial sequence
  SiRNA target sequence
ctttgttcaaagaaatattcc

SEQ ID NO: 294944 - DNA, 21 bp, Artificial sequence
  SiRNA target sequence
tttgttcaaagaaatattccg

SEQ ID NO: 294945 - DNA, 21 bp, Artificial sequence
  SiRNA target sequence
ttgttcaaagaaatattccgc

SEQ ID NO: 294946 - DNA, 21 bp, Artificial sequence
  SiRNA target sequence
tgttcaaagaaatattccgcc

SEQ ID NO: 294947 - DNA, 21 bp, Artificial sequence
  SiRNA target sequence
gttcaaagaaatattccgccc

SEQ ID NO: 294948 - DNA, 21 bp, Artificial sequence
  SiRNA target sequence
ttcaaagaaatattccgccct

SEQ ID NO: 294949 - DNA, 21 bp, Artificial sequence
  SiRNA target sequence
tcaaagaaatattccgccctt

SEQ ID NO: 294950 - DNA, 21 bp, Artificial sequence
  SiRNA target sequence
caaagaaatattccgccctta

SEQ ID NO: 294951 - DNA, 21 bp, Artificial sequence
  SiRNA target sequence
aaagaaatattccgcccttaa

SEQ ID NO: 294952 - DNA, 21 bp, Artificial sequence
  SiRNA target sequence
aagaaatattccgcccttaac

SEQ ID NO: 294953 - DNA, 21 bp, Artificial sequence
  SiRNA target sequence
agaaatattccgcccttaacg

SEQ ID NO: 294954 - DNA, 21 bp, Artificial sequence
  SiRNA target sequence
gaaatattccgcccttaacgg

SEQ ID NO: 294955 - DNA, 21 bp, Artificial sequence
  SiRNA target sequence
aaatattccgcccttaacgga

SEQ ID NO: 294956 - DNA, 21 bp, Artificial sequence
  SiRNA target sequence
aatattccgcccttaacggaa

SEQ ID NO: 294957 - DNA, 21 bp, Artificial sequence
  SiRNA target sequence
atattccgcccttaacggaac

SEQ ID NO: 294958 - DNA, 21 bp, Artificial sequence
  SiRNA target sequence
tattccgcccttaacggaaca

SEQ ID NO: 294959 - DNA, 21 bp, Artificial sequence
  SiRNA target sequence
attccgcccttaacggaacaa

SEQ ID NO: 294960 - DNA, 21 bp, Artificial sequence
  SiRNA target sequence
ttccgcccttaacggaacaaa

SEQ ID NO: 294961 - DNA, 21 bp, Artificial sequence
  SiRNA target sequence
tccgcccttaacggaacaaaa

SEQ ID NO: 294962 - DNA, 21 bp, Artificial sequence
  SiRNA target sequence
ccgcccttaacggaacaaaat

SEQ ID NO: 294963 - DNA, 21 bp, Artificial sequence
  SiRNA target sequence
cgcccttaacggaacaaaatg

SEQ ID NO: 294964 - DNA, 21 bp, Artificial sequence
  SiRNA target sequence
gcccttaacggaacaaaatgc

SEQ ID NO: 294965 - DNA, 21 bp, Artificial sequence
  SiRNA target sequence
cccttaacggaacaaaatgct

SEQ ID NO: 294966 - DNA, 21 bp, Artificial sequence
  SiRNA target sequence
ccttaacggaacaaaatgcta

SEQ ID NO: 294967 - DNA, 21 bp, Artificial sequence
  SiRNA target sequence
cttaacggaacaaaatgctat

SEQ ID NO: 294968 - DNA, 21 bp, Artificial sequence
  SiRNA target sequence
ttaacggaacaaaatgctatg

SEQ ID NO: 294969 - DNA, 21 bp, Artificial sequence
  SiRNA target sequence
taacggaacaaaatgctatgt

SEQ ID NO: 294970 - DNA, 21 bp, Artificial sequence
  SiRNA target sequence
aacggaacaaaatgctatgta

SEQ ID NO: 294971 - DNA, 21 bp, Artificial sequence
  SiRNA target sequence
acggaacaaaatgctatgtaa

SEQ ID NO: 294972 - DNA, 21 bp, Artificial sequence
  SiRNA target sequence
cggaacaaaatgctatgtaat

SEQ ID NO: 294973 - DNA, 21 bp, Artificial sequence
  SiRNA target sequence
ggaacaaaatgctatgtaatg

SEQ ID NO: 294974 - DNA, 21 bp, Artificial sequence
  SiRNA target sequence
gaacaaaatgctatgtaatga

SEQ ID NO: 294975 - DNA, 21 bp, Artificial sequence
  SiRNA target sequence
aacaaaatgctatgtaatgaa

SEQ ID NO: 294976 - DNA, 21 bp, Artificial sequence
  SiRNA target sequence
acaaaatgctatgtaatgaaa

SEQ ID NO: 294977 - DNA, 21 bp, Artificial sequence
  SiRNA target sequence
caaaatgctatgtaatgaaag

SEQ ID NO: 294978 - DNA, 21 bp, Artificial sequence
  SiRNA target sequence
aaaatgctatgtaatgaaaga

SEQ ID NO: 294979 - DNA, 21 bp, Artificial sequence
  SiRNA target sequence
aaatgctatgtaatgaaagac

SEQ ID NO: 294980 - DNA, 21 bp, Artificial sequence
  SiRNA target sequence
aatgctatgtaatgaaagact

SEQ ID NO: 294981 - DNA, 21 bp, Artificial sequence
  SiRNA target sequence
atgctatgtaatgaaagactt

SEQ ID NO: 294982 - DNA, 21 bp, Artificial sequence
  SiRNA target sequence
tgctatgtaatgaaagacttt

SEQ ID NO: 294983 - DNA, 21 bp, Artificial sequence
  SiRNA target sequence
gctatgtaatgaaagactttt

SEQ ID NO: 294984 - DNA, 21 bp, Artificial sequence
  SiRNA target sequence
ctatgtaatgaaagacttttc

SEQ ID NO: 294985 - DNA, 21 bp, Artificial sequence
  SiRNA target sequence
tatgtaatgaaagacttttct

SEQ ID NO: 294986 - DNA, 21 bp, Artificial sequence
  SiRNA target sequence
atgtaatgaaagacttttcta

SEQ ID NO: 294987 - DNA, 21 bp, Artificial sequence
  SiRNA target sequence
tgtaatgaaagacttttctaa

SEQ ID NO: 294988 - DNA, 21 bp, Artificial sequence
  SiRNA target sequence
gtaatgaaagacttttctaag

SEQ ID NO: 294989 - DNA, 21 bp, Artificial sequence
  SiRNA target sequence
taatgaaagacttttctaagc

SEQ ID NO: 294990 - DNA, 21 bp, Artificial sequence
  SiRNA target sequence
aatgaaagacttttctaagca

SEQ ID NO: 294991 - DNA, 21 bp, Artificial sequence
  SiRNA target sequence
atgaaagacttttctaagcat

SEQ ID NO: 294992 - DNA, 21 bp, Artificial sequence
  SiRNA target sequence
tgaaagacttttctaagcatg

SEQ ID NO: 294993 - DNA, 21 bp, Artificial sequence
  SiRNA target sequence
gaaagacttttctaagcatgt

SEQ ID NO: 294994 - DNA, 21 bp, Artificial sequence
  SiRNA target sequence
aaagacttttctaagcatgta

SEQ ID NO: 294995 - DNA, 21 bp, Artificial sequence
  SiRNA target sequence
aagacttttctaagcatgtaa

SEQ ID NO: 294996 - DNA, 21 bp, Artificial sequence
  SiRNA target sequence
agacttttctaagcatgtaag

SEQ ID NO: 294997 - DNA, 21 bp, Artificial sequence
  SiRNA target sequence
gacttttctaagcatgtaagt

SEQ ID NO: 294998 - DNA, 21 bp, Artificial sequence
  SiRNA target sequence
acttttctaagcatgtaagta

SEQ ID NO: 294999 - DNA, 21 bp, Artificial sequence
  SiRNA target sequence
cttttctaagcatgtaagtat

SEQ ID NO: 295000 - DNA, 21 bp, Artificial sequence
  SiRNA target sequence
ttttctaagcatgtaagtata

SEQ ID NO: 295001 - DNA, 21 bp, Artificial sequence
  SiRNA target sequence
tttctaagcatgtaagtatag

SEQ ID NO: 295002 - DNA, 21 bp, Artificial sequence
  SiRNA target sequence
ttctaagcatgtaagtatagt

SEQ ID NO: 295003 - DNA, 21 bp, Artificial sequence
  SiRNA target sequence
tctaagcatgtaagtatagtt

SEQ ID NO: 295004 - DNA, 21 bp, Artificial sequence
  SiRNA target sequence
ctaagcatgtaagtatagttt

SEQ ID NO: 295005 - DNA, 21 bp, Artificial sequence
  SiRNA target sequence
taagcatgtaagtatagtttc

SEQ ID NO: 295006 - DNA, 21 bp, Artificial sequence
  SiRNA target sequence
aagcatgtaagtatagtttct

SEQ ID NO: 295007 - DNA, 21 bp, Artificial sequence
  SiRNA target sequence
agcatgtaagtatagtttctt

SEQ ID NO: 295008 - DNA, 21 bp, Artificial sequence
  SiRNA target sequence
gcatgtaagtatagtttctta

SEQ ID NO: 295009 - DNA, 21 bp, Artificial sequence
  SiRNA target sequence
catgtaagtatagtttcttat

SEQ ID NO: 295010 - DNA, 21 bp, Artificial sequence
  SiRNA target sequence
atgtaagtatagtttcttatg

SEQ ID NO: 295011 - DNA, 21 bp, Artificial sequence
  SiRNA target sequence
tgtaagtatagtttcttatgg

SEQ ID NO: 295012 - DNA, 21 bp, Artificial sequence
  SiRNA target sequence
gtaagtatagtttcttatgga

SEQ ID NO: 295013 - DNA, 21 bp, Artificial sequence
  SiRNA target sequence
taagtatagtttcttatggag

SEQ ID NO: 295014 - DNA, 21 bp, Artificial sequence
  SiRNA target sequence
aagtatagtttcttatggaga

SEQ ID NO: 295015 - DNA, 21 bp, Artificial sequence
  SiRNA target sequence
agtatagtttcttatggagat

SEQ ID NO: 295016 - DNA, 21 bp, Artificial sequence
  SiRNA target sequence
gtatagtttcttatggagatg

SEQ ID NO: 295017 - DNA, 21 bp, Artificial sequence
  SiRNA target sequence
tatagtttcttatggagatga

SEQ ID NO: 295018 - DNA, 21 bp, Artificial sequence
  SiRNA target sequence
atagtttcttatggagatgat

SEQ ID NO: 295019 - DNA, 21 bp, Artificial sequence
  SiRNA target sequence
tagtttcttatggagatgata

SEQ ID NO: 295020 - DNA, 21 bp, Artificial sequence
  SiRNA target sequence
agtttcttatggagatgataa

SEQ ID NO: 295021 - DNA, 21 bp, Artificial sequence
  SiRNA target sequence
gtttcttatggagatgataat

SEQ ID NO: 295022 - DNA, 21 bp, Artificial sequence
  SiRNA target sequence
tttcttatggagatgataatg

SEQ ID NO: 295023 - DNA, 21 bp, Artificial sequence
  SiRNA target sequence
ttcttatggagatgataatgt

SEQ ID NO: 295024 - DNA, 21 bp, Artificial sequence
  SiRNA target sequence
tcttatggagatgataatgtt

SEQ ID NO: 295025 - DNA, 21 bp, Artificial sequence
  SiRNA target sequence
cttatggagatgataatgtta

SEQ ID NO: 295026 - DNA, 21 bp, Artificial sequence
  SiRNA target sequence
ttatggagatgataatgttat

SEQ ID NO: 295027 - DNA, 21 bp, Artificial sequence
  SiRNA target sequence
tatggagatgataatgttatt

SEQ ID NO: 295028 - DNA, 21 bp, Artificial sequence
  SiRNA target sequence
atggagatgataatgttatta

SEQ ID NO: 295029 - DNA, 21 bp, Artificial sequence
  SiRNA target sequence
tggagatgataatgttattaa

SEQ ID NO: 295030 - DNA, 21 bp, Artificial sequence
  SiRNA target sequence
ggagatgataatgttattaac

SEQ ID NO: 295031 - DNA, 21 bp, Artificial sequence
  SiRNA target sequence
gagatgataatgttattaact

SEQ ID NO: 295032 - DNA, 21 bp, Artificial sequence
  SiRNA target sequence
agatgataatgttattaactt

SEQ ID NO: 295033 - DNA, 21 bp, Artificial sequence
  SiRNA target sequence
gatgataatgttattaacttt

SEQ ID NO: 295034 - DNA, 21 bp, Artificial sequence
  SiRNA target sequence
atgataatgttattaacttta

SEQ ID NO: 295035 - DNA, 21 bp, Artificial sequence
  SiRNA target sequence
tgataatgttattaactttag

SEQ ID NO: 295036 - DNA, 21 bp, Artificial sequence
  SiRNA target sequence
gataatgttattaactttagt

SEQ ID NO: 295037 - DNA, 21 bp, Artificial sequence
  SiRNA target sequence
ataatgttattaactttagtg

SEQ ID NO: 295038 - DNA, 21 bp, Artificial sequence
  SiRNA target sequence
taatgttattaactttagtga

SEQ ID NO: 295039 - DNA, 21 bp, Artificial sequence
  SiRNA target sequence
aatgttattaactttagtgat

SEQ ID NO: 295040 - DNA, 21 bp, Artificial sequence
  SiRNA target sequence
atgttattaactttagtgatg

SEQ ID NO: 295041 - DNA, 21 bp, Artificial sequence
  SiRNA target sequence
tgttattaactttagtgatga

SEQ ID NO: 295042 - DNA, 21 bp, Artificial sequence
  SiRNA target sequence
gttattaactttagtgatgaa

SEQ ID NO: 295043 - DNA, 21 bp, Artificial sequence
  SiRNA target sequence
ttattaactttagtgatgaag

SEQ ID NO: 295044 - DNA, 21 bp, Artificial sequence
  SiRNA target sequence
tattaactttagtgatgaagt

SEQ ID NO: 295045 - DNA, 21 bp, Artificial sequence
  SiRNA target sequence
attaactttagtgatgaagtt

SEQ ID NO: 295046 - DNA, 21 bp, Artificial sequence
  SiRNA target sequence
ttaactttagtgatgaagtta

SEQ ID NO: 295047 - DNA, 21 bp, Artificial sequence
  SiRNA target sequence
taactttagtgatgaagttag

SEQ ID NO: 295048 - DNA, 21 bp, Artificial sequence
  SiRNA target sequence
aactttagtgatgaagttagt

SEQ ID NO: 295049 - DNA, 21 bp, Artificial sequence
  SiRNA target sequence
actttagtgatgaagttagtg

SEQ ID NO: 295050 - DNA, 21 bp, Artificial sequence
  SiRNA target sequence
ctttagtgatgaagttagtga

SEQ ID NO: 295051 - DNA, 21 bp, Artificial sequence
  SiRNA target sequence
tttagtgatgaagttagtgaa

SEQ ID NO: 295052 - DNA, 21 bp, Artificial sequence
  SiRNA target sequence
ttagtgatgaagttagtgaat

SEQ ID NO: 295053 - DNA, 21 bp, Artificial sequence
  SiRNA target sequence
tagtgatgaagttagtgaatg

SEQ ID NO: 295054 - DNA, 21 bp, Artificial sequence
  SiRNA target sequence
agtgatgaagttagtgaatgg

SEQ ID NO: 295055 - DNA, 21 bp, Artificial sequence
  SiRNA target sequence
gtgatgaagttagtgaatggt

SEQ ID NO: 295056 - DNA, 21 bp, Artificial sequence
  SiRNA target sequence
tgatgaagttagtgaatggtt

SEQ ID NO: 295057 - DNA, 21 bp, Artificial sequence
  SiRNA target sequence
gatgaagttagtgaatggttc

SEQ ID NO: 295058 - DNA, 21 bp, Artificial sequence
  SiRNA target sequence
atgaagttagtgaatggttca

SEQ ID NO: 295059 - DNA, 21 bp, Artificial sequence
  SiRNA target sequence
tgaagttagtgaatggttcaa

SEQ ID NO: 295060 - DNA, 21 bp, Artificial sequence
  SiRNA target sequence
gaagttagtgaatggttcaac

SEQ ID NO: 295061 - DNA, 21 bp, Artificial sequence
  SiRNA target sequence
aagttagtgaatggttcaaca

SEQ ID NO: 295062 - DNA, 21 bp, Artificial sequence
  SiRNA target sequence
agttagtgaatggttcaacat

SEQ ID NO: 295063 - DNA, 21 bp, Artificial sequence
  SiRNA target sequence
gttagtgaatggttcaacatg

SEQ ID NO: 295064 - DNA, 21 bp, Artificial sequence
  SiRNA target sequence
ttagtgaatggttcaacatgg

SEQ ID NO: 295065 - DNA, 21 bp, Artificial sequence
  SiRNA target sequence
tagtgaatggttcaacatgga

SEQ ID NO: 295066 - DNA, 21 bp, Artificial sequence
  SiRNA target sequence
agtgaatggttcaacatggaa

SEQ ID NO: 295067 - DNA, 21 bp, Artificial sequence
  SiRNA target sequence
gtgaatggttcaacatggaaa

SEQ ID NO: 295068 - DNA, 21 bp, Artificial sequence
  SiRNA target sequence
tgaatggttcaacatggaaac

SEQ ID NO: 295069 - DNA, 21 bp, Artificial sequence
  SiRNA target sequence
gaatggttcaacatggaaact

SEQ ID NO: 295070 - DNA, 21 bp, Artificial sequence
  SiRNA target sequence
aatggttcaacatggaaacta

SEQ ID NO: 295071 - DNA, 21 bp, Artificial sequence
  SiRNA target sequence
atggttcaacatggaaactat

SEQ ID NO: 295072 - DNA, 21 bp, Artificial sequence
  SiRNA target sequence
tggttcaacatggaaactatt

SEQ ID NO: 295073 - DNA, 21 bp, Artificial sequence
  SiRNA target sequence
ggttcaacatggaaactatta

SEQ ID NO: 295074 - DNA, 21 bp, Artificial sequence
  SiRNA target sequence
gttcaacatggaaactattac

SEQ ID NO: 295075 - DNA, 21 bp, Artificial sequence
  SiRNA target sequence
ttcaacatggaaactattact

SEQ ID NO: 295076 - DNA, 21 bp, Artificial sequence
  SiRNA target sequence
tcaacatggaaactattactg

SEQ ID NO: 295077 - DNA, 21 bp, Artificial sequence
  SiRNA target sequence
caacatggaaactattactga

SEQ ID NO: 295078 - DNA, 21 bp, Artificial sequence
  SiRNA target sequence
aacatggaaactattactgaa

SEQ ID NO: 295079 - DNA, 21 bp, Artificial sequence
  SiRNA target sequence
acatggaaactattactgaag

SEQ ID NO: 295080 - DNA, 21 bp, Artificial sequence
  SiRNA target sequence
catggaaactattactgaagc

SEQ ID NO: 295081 - DNA, 21 bp, Artificial sequence
  SiRNA target sequence
atggaaactattactgaagct

SEQ ID NO: 295082 - DNA, 21 bp, Artificial sequence
  SiRNA target sequence
tggaaactattactgaagctt

SEQ ID NO: 295083 - DNA, 21 bp, Artificial sequence
  SiRNA target sequence
ggaaactattactgaagcttt

SEQ ID NO: 295084 - DNA, 21 bp, Artificial sequence
  SiRNA target sequence
gaaactattactgaagctttt

SEQ ID NO: 295085 - DNA, 21 bp, Artificial sequence
  SiRNA target sequence
aaactattactgaagcttttg

SEQ ID NO: 295086 - DNA, 21 bp, Artificial sequence
  SiRNA target sequence
aactattactgaagcttttga

SEQ ID NO: 295087 - DNA, 21 bp, Artificial sequence
  SiRNA target sequence
actattactgaagcttttgag

SEQ ID NO: 295088 - DNA, 21 bp, Artificial sequence
  SiRNA target sequence
ctattactgaagcttttgaga

SEQ ID NO: 295089 - DNA, 21 bp, Artificial sequence
  SiRNA target sequence
tattactgaagcttttgagaa

SEQ ID NO: 295090 - DNA, 21 bp, Artificial sequence
  SiRNA target sequence
attactgaagcttttgagaag

SEQ ID NO: 295091 - DNA, 21 bp, Artificial sequence
  SiRNA target sequence
ttactgaagcttttgagaagt

SEQ ID NO: 295092 - DNA, 21 bp, Artificial sequence
  SiRNA target sequence
tactgaagcttttgagaagtt

SEQ ID NO: 295093 - DNA, 21 bp, Artificial sequence
  SiRNA target sequence
actgaagcttttgagaagtta

SEQ ID NO: 295094 - DNA, 21 bp, Artificial sequence
  SiRNA target sequence
ctgaagcttttgagaagttag

SEQ ID NO: 295095 - DNA, 21 bp, Artificial sequence
  SiRNA target sequence
tgaagcttttgagaagttagg

SEQ ID NO: 295096 - DNA, 21 bp, Artificial sequence
  SiRNA target sequence
gaagcttttgagaagttaggg

SEQ ID NO: 295097 - DNA, 21 bp, Artificial sequence
  SiRNA target sequence
aagcttttgagaagttagggt

SEQ ID NO: 295098 - DNA, 21 bp, Artificial sequence
  SiRNA target sequence
agcttttgagaagttagggtt

SEQ ID NO: 295099 - DNA, 21 bp, Artificial sequence
  SiRNA target sequence
gcttttgagaagttagggttt

SEQ ID NO: 295100 - DNA, 21 bp, Artificial sequence
  SiRNA target sequence
cttttgagaagttagggttta

SEQ ID NO: 295101 - DNA, 21 bp, Artificial sequence
  SiRNA target sequence
ttttgagaagttagggtttac

SEQ ID NO: 295102 - DNA, 21 bp, Artificial sequence
  SiRNA target sequence
tttgagaagttagggtttacg

SEQ ID NO: 295103 - DNA, 21 bp, Artificial sequence
  SiRNA target sequence
ttgagaagttagggtttacgt

SEQ ID NO: 295104 - DNA, 21 bp, Artificial sequence
  SiRNA target sequence
tgagaagttagggtttacgta

SEQ ID NO: 295105 - DNA, 21 bp, Artificial sequence
  SiRNA target sequence
gagaagttagggtttacgtat

SEQ ID NO: 295106 - DNA, 21 bp, Artificial sequence
  SiRNA target sequence
agaagttagggtttacgtata

SEQ ID NO: 295107 - DNA, 21 bp, Artificial sequence
  SiRNA target sequence
gaagttagggtttacgtatac

SEQ ID NO: 295108 - DNA, 21 bp, Artificial sequence
  SiRNA target sequence
aagttagggtttacgtatact

SEQ ID NO: 295109 - DNA, 21 bp, Artificial sequence
  SiRNA target sequence
agttagggtttacgtatactg

SEQ ID NO: 295110 - DNA, 21 bp, Artificial sequence
  SiRNA target sequence
gttagggtttacgtatactga

SEQ ID NO: 295111 - DNA, 21 bp, Artificial sequence
  SiRNA target sequence
ttagggtttacgtatactgac

SEQ ID NO: 295112 - DNA, 21 bp, Artificial sequence
  SiRNA target sequence
tagggtttacgtatactgacg

SEQ ID NO: 295113 - DNA, 21 bp, Artificial sequence
  SiRNA target sequence
agggtttacgtatactgacga

SEQ ID NO: 295114 - DNA, 21 bp, Artificial sequence
  SiRNA target sequence
gggtttacgtatactgacgaa

SEQ ID NO: 295115 - DNA, 21 bp, Artificial sequence
  SiRNA target sequence
ggtttacgtatactgacgaac

SEQ ID NO: 295116 - DNA, 21 bp, Artificial sequence
  SiRNA target sequence
gtttacgtatactgacgaact

SEQ ID NO: 295117 - DNA, 21 bp, Artificial sequence
  SiRNA target sequence
tttacgtatactgacgaactt

SEQ ID NO: 295118 - DNA, 21 bp, Artificial sequence
  SiRNA target sequence
ttacgtatactgacgaactta

SEQ ID NO: 295119 - DNA, 21 bp, Artificial sequence
  SiRNA target sequence
tacgtatactgacgaacttaa

SEQ ID NO: 295120 - DNA, 21 bp, Artificial sequence
  SiRNA target sequence
acgtatactgacgaacttaaa

SEQ ID NO: 295121 - DNA, 21 bp, Artificial sequence
  SiRNA target sequence
cgtatactgacgaacttaaag

SEQ ID NO: 295122 - DNA, 21 bp, Artificial sequence
  SiRNA target sequence
gtatactgacgaacttaaagg

SEQ ID NO: 295123 - DNA, 21 bp, Artificial sequence
  SiRNA target sequence
tatactgacgaacttaaaggc

SEQ ID NO: 295124 - DNA, 21 bp, Artificial sequence
  SiRNA target sequence
atactgacgaacttaaaggca

SEQ ID NO: 295125 - DNA, 21 bp, Artificial sequence
  SiRNA target sequence
tactgacgaacttaaaggcaa

SEQ ID NO: 295126 - DNA, 21 bp, Artificial sequence
  SiRNA target sequence
actgacgaacttaaaggcaag

SEQ ID NO: 295127 - DNA, 21 bp, Artificial sequence
  SiRNA target sequence
ctgacgaacttaaaggcaaga

SEQ ID NO: 295128 - DNA, 21 bp, Artificial sequence
  SiRNA target sequence
tgacgaacttaaaggcaagaa

SEQ ID NO: 295129 - DNA, 21 bp, Artificial sequence
  SiRNA target sequence
gacgaacttaaaggcaagaat

SEQ ID NO: 295130 - DNA, 21 bp, Artificial sequence
  SiRNA target sequence
acgaacttaaaggcaagaatg

SEQ ID NO: 295131 - DNA, 21 bp, Artificial sequence
  SiRNA target sequence
cgaacttaaaggcaagaatgg

SEQ ID NO: 295132 - DNA, 21 bp, Artificial sequence
  SiRNA target sequence
gaacttaaaggcaagaatgga

SEQ ID NO: 295133 - DNA, 21 bp, Artificial sequence
  SiRNA target sequence
aacttaaaggcaagaatggag

SEQ ID NO: 295134 - DNA, 21 bp, Artificial sequence
  SiRNA target sequence
acttaaaggcaagaatggaga

SEQ ID NO: 295135 - DNA, 21 bp, Artificial sequence
  SiRNA target sequence
cttaaaggcaagaatggagaa

SEQ ID NO: 295136 - DNA, 21 bp, Artificial sequence
  SiRNA target sequence
ttaaaggcaagaatggagaag

SEQ ID NO: 295137 - DNA, 21 bp, Artificial sequence
  SiRNA target sequence
taaaggcaagaatggagaagt

SEQ ID NO: 295138 - DNA, 21 bp, Artificial sequence
  SiRNA target sequence
aaaggcaagaatggagaagta

SEQ ID NO: 295139 - DNA, 21 bp, Artificial sequence
  SiRNA target sequence
aaggcaagaatggagaagtac

SEQ ID NO: 295140 - DNA, 21 bp, Artificial sequence
  SiRNA target sequence
aggcaagaatggagaagtacc

SEQ ID NO: 295141 - DNA, 21 bp, Artificial sequence
  SiRNA target sequence
ggcaagaatggagaagtacca

SEQ ID NO: 295142 - DNA, 21 bp, Artificial sequence
  SiRNA target sequence
gcaagaatggagaagtaccaa

SEQ ID NO: 295143 - DNA, 21 bp, Artificial sequence
  SiRNA target sequence
caagaatggagaagtaccaaa

SEQ ID NO: 295144 - DNA, 21 bp, Artificial sequence
  SiRNA target sequence
aagaatggagaagtaccaaaa

SEQ ID NO: 295145 - DNA, 21 bp, Artificial sequence
  SiRNA target sequence
agaatggagaagtaccaaaat

SEQ ID NO: 295146 - DNA, 21 bp, Artificial sequence
  SiRNA target sequence
gaatggagaagtaccaaaatg

SEQ ID NO: 295147 - DNA, 21 bp, Artificial sequence
  SiRNA target sequence
aatggagaagtaccaaaatgg

SEQ ID NO: 295148 - DNA, 21 bp, Artificial sequence
  SiRNA target sequence
atggagaagtaccaaaatggc

SEQ ID NO: 295149 - DNA, 21 bp, Artificial sequence
  SiRNA target sequence
tggagaagtaccaaaatggcg

SEQ ID NO: 295150 - DNA, 21 bp, Artificial sequence
  SiRNA target sequence
ggagaagtaccaaaatggcga

SEQ ID NO: 295151 - DNA, 21 bp, Artificial sequence
  SiRNA target sequence
gagaagtaccaaaatggcgaa

SEQ ID NO: 295152 - DNA, 21 bp, Artificial sequence
  SiRNA target sequence
agaagtaccaaaatggcgaac

SEQ ID NO: 295153 - DNA, 21 bp, Artificial sequence
  SiRNA target sequence
gaagtaccaaaatggcgaact

SEQ ID NO: 295154 - DNA, 21 bp, Artificial sequence
  SiRNA target sequence
aagtaccaaaatggcgaacta

SEQ ID NO: 295155 - DNA, 21 bp, Artificial sequence
  SiRNA target sequence
agtaccaaaatggcgaactat

SEQ ID NO: 295156 - DNA, 21 bp, Artificial sequence
  SiRNA target sequence
gtaccaaaatggcgaactatt

SEQ ID NO: 295157 - DNA, 21 bp, Artificial sequence
  SiRNA target sequence
taccaaaatggcgaactattg

SEQ ID NO: 295158 - DNA, 21 bp, Artificial sequence
  SiRNA target sequence
accaaaatggcgaactattga

SEQ ID NO: 295159 - DNA, 21 bp, Artificial sequence
  SiRNA target sequence
ccaaaatggcgaactattgaa

SEQ ID NO: 295160 - DNA, 21 bp, Artificial sequence
  SiRNA target sequence
caaaatggcgaactattgaag

SEQ ID NO: 295161 - DNA, 21 bp, Artificial sequence
  SiRNA target sequence
aaaatggcgaactattgaaga

SEQ ID NO: 295162 - DNA, 21 bp, Artificial sequence
  SiRNA target sequence
aaatggcgaactattgaagat

SEQ ID NO: 295163 - DNA, 21 bp, Artificial sequence
  SiRNA target sequence
aatggcgaactattgaagatg

SEQ ID NO: 295164 - DNA, 21 bp, Artificial sequence
  SiRNA target sequence
atggcgaactattgaagatgt

SEQ ID NO: 295165 - DNA, 21 bp, Artificial sequence
  SiRNA target sequence
tggcgaactattgaagatgtg

SEQ ID NO: 295166 - DNA, 21 bp, Artificial sequence
  SiRNA target sequence
ggcgaactattgaagatgtgc

SEQ ID NO: 295167 - DNA, 21 bp, Artificial sequence
  SiRNA target sequence
gcgaactattgaagatgtgca

SEQ ID NO: 295168 - DNA, 21 bp, Artificial sequence
  SiRNA target sequence
cgaactattgaagatgtgcaa

SEQ ID NO: 295169 - DNA, 21 bp, Artificial sequence
  SiRNA target sequence
gaactattgaagatgtgcaat

SEQ ID NO: 295170 - DNA, 21 bp, Artificial sequence
  SiRNA target sequence
aactattgaagatgtgcaata

SEQ ID NO: 295171 - DNA, 21 bp, Artificial sequence
  SiRNA target sequence
actattgaagatgtgcaatat

SEQ ID NO: 295172 - DNA, 21 bp, Artificial sequence
  SiRNA target sequence
ctattgaagatgtgcaatatc

SEQ ID NO: 295173 - DNA, 21 bp, Artificial sequence
  SiRNA target sequence
tattgaagatgtgcaatatct

SEQ ID NO: 295174 - DNA, 21 bp, Artificial sequence
  SiRNA target sequence
attgaagatgtgcaatatctc

SEQ ID NO: 295175 - DNA, 21 bp, Artificial sequence
  SiRNA target sequence
ttgaagatgtgcaatatctca

SEQ ID NO: 295176 - DNA, 21 bp, Artificial sequence
  SiRNA target sequence
tgaagatgtgcaatatctcaa

SEQ ID NO: 295177 - DNA, 21 bp, Artificial sequence
  SiRNA target sequence
gaagatgtgcaatatctcaaa

SEQ ID NO: 295178 - DNA, 21 bp, Artificial sequence
  SiRNA target sequence
aagatgtgcaatatctcaaaa

SEQ ID NO: 295179 - DNA, 21 bp, Artificial sequence
  SiRNA target sequence
agatgtgcaatatctcaaaag

SEQ ID NO: 295180 - DNA, 21 bp, Artificial sequence
  SiRNA target sequence
gatgtgcaatatctcaaaagg

SEQ ID NO: 295181 - DNA, 21 bp, Artificial sequence
  SiRNA target sequence
atgtgcaatatctcaaaagga

SEQ ID NO: 295182 - DNA, 21 bp, Artificial sequence
  SiRNA target sequence
tgtgcaatatctcaaaaggaa

SEQ ID NO: 295183 - DNA, 21 bp, Artificial sequence
  SiRNA target sequence
gtgcaatatctcaaaaggaaa

SEQ ID NO: 295184 - DNA, 21 bp, Artificial sequence
  SiRNA target sequence
tgcaatatctcaaaaggaaat

SEQ ID NO: 295185 - DNA, 21 bp, Artificial sequence
  SiRNA target sequence
gcaatatctcaaaaggaaatt

SEQ ID NO: 295186 - DNA, 21 bp, Artificial sequence
  SiRNA target sequence
caatatctcaaaaggaaattt

SEQ ID NO: 295187 - DNA, 21 bp, Artificial sequence
  SiRNA target sequence
aatatctcaaaaggaaatttc

SEQ ID NO: 295188 - DNA, 21 bp, Artificial sequence
  SiRNA target sequence
atatctcaaaaggaaatttcg

SEQ ID NO: 295189 - DNA, 21 bp, Artificial sequence
  SiRNA target sequence
tatctcaaaaggaaatttcga

SEQ ID NO: 295190 - DNA, 21 bp, Artificial sequence
  SiRNA target sequence
atctcaaaaggaaatttcgat

SEQ ID NO: 295191 - DNA, 21 bp, Artificial sequence
  SiRNA target sequence
tctcaaaaggaaatttcgata

SEQ ID NO: 295192 - DNA, 21 bp, Artificial sequence
  SiRNA target sequence
ctcaaaaggaaatttcgatat

SEQ ID NO: 295193 - DNA, 21 bp, Artificial sequence
  SiRNA target sequence
tcaaaaggaaatttcgatatg

SEQ ID NO: 295194 - DNA, 21 bp, Artificial sequence
  SiRNA target sequence
caaaaggaaatttcgatatga

SEQ ID NO: 295195 - DNA, 21 bp, Artificial sequence
  SiRNA target sequence
aaaaggaaatttcgatatgat

SEQ ID NO: 295196 - DNA, 21 bp, Artificial sequence
  SiRNA target sequence
aaaggaaatttcgatatgatt

SEQ ID NO: 295197 - DNA, 21 bp, Artificial sequence
  SiRNA target sequence
aaggaaatttcgatatgattc

SEQ ID NO: 295198 - DNA, 21 bp, Artificial sequence
  SiRNA target sequence
aggaaatttcgatatgattct

SEQ ID NO: 295199 - DNA, 21 bp, Artificial sequence
  SiRNA target sequence
ggaaatttcgatatgattcta

SEQ ID NO: 295200 - DNA, 21 bp, Artificial sequence
  SiRNA target sequence
gaaatttcgatatgattctaa

SEQ ID NO: 295201 - DNA, 21 bp, Artificial sequence
  SiRNA target sequence
aaatttcgatatgattctaaa

SEQ ID NO: 295202 - DNA, 21 bp, Artificial sequence
  SiRNA target sequence
aatttcgatatgattctaaac

SEQ ID NO: 295203 - DNA, 21 bp, Artificial sequence
  SiRNA target sequence
atttcgatatgattctaaacg

SEQ ID NO: 295204 - DNA, 21 bp, Artificial sequence
  SiRNA target sequence
tttcgatatgattctaaacgg

SEQ ID NO: 295205 - DNA, 21 bp, Artificial sequence
  SiRNA target sequence
ttcgatatgattctaaacgga

SEQ ID NO: 295206 - DNA, 21 bp, Artificial sequence
  SiRNA target sequence
tcgatatgattctaaacggaa

SEQ ID NO: 295207 - DNA, 21 bp, Artificial sequence
  SiRNA target sequence
cgatatgattctaaacggaaa

SEQ ID NO: 295208 - DNA, 21 bp, Artificial sequence
  SiRNA target sequence
gatatgattctaaacggaaag

SEQ ID NO: 295209 - DNA, 21 bp, Artificial sequence
  SiRNA target sequence
atatgattctaaacggaaagt

SEQ ID NO: 295210 - DNA, 21 bp, Artificial sequence
  SiRNA target sequence
tatgattctaaacggaaagta

SEQ ID NO: 295211 - DNA, 21 bp, Artificial sequence
  SiRNA target sequence
atgattctaaacggaaagtat

SEQ ID NO: 295212 - DNA, 21 bp, Artificial sequence
  SiRNA target sequence
tgattctaaacggaaagtatg

SEQ ID NO: 295213 - DNA, 21 bp, Artificial sequence
  SiRNA target sequence
gattctaaacggaaagtatgg

SEQ ID NO: 295214 - DNA, 21 bp, Artificial sequence
  SiRNA target sequence
attctaaacggaaagtatggg

SEQ ID NO: 295215 - DNA, 21 bp, Artificial sequence
  SiRNA target sequence
ttctaaacggaaagtatggga

SEQ ID NO: 295216 - DNA, 21 bp, Artificial sequence
  SiRNA target sequence
tctaaacggaaagtatgggaa

SEQ ID NO: 295217 - DNA, 21 bp, Artificial sequence
  SiRNA target sequence
ctaaacggaaagtatgggaag

SEQ ID NO: 295218 - DNA, 21 bp, Artificial sequence
  SiRNA target sequence
taaacggaaagtatgggaagc

SEQ ID NO: 295219 - DNA, 21 bp, Artificial sequence
  SiRNA target sequence
aaacggaaagtatgggaagcg

SEQ ID NO: 295220 - DNA, 21 bp, Artificial sequence
  SiRNA target sequence
aacggaaagtatgggaagcgc

SEQ ID NO: 295221 - DNA, 21 bp, Artificial sequence
  SiRNA target sequence
acggaaagtatgggaagcgcc

SEQ ID NO: 295222 - DNA, 21 bp, Artificial sequence
  SiRNA target sequence
cggaaagtatgggaagcgcca

SEQ ID NO: 295223 - DNA, 21 bp, Artificial sequence
  SiRNA target sequence
ggaaagtatgggaagcgccat

SEQ ID NO: 295224 - DNA, 21 bp, Artificial sequence
  SiRNA target sequence
gaaagtatgggaagcgccatt

SEQ ID NO: 295225 - DNA, 21 bp, Artificial sequence
  SiRNA target sequence
aaagtatgggaagcgccattg

SEQ ID NO: 295226 - DNA, 21 bp, Artificial sequence
  SiRNA target sequence
aagtatgggaagcgccattgt

SEQ ID NO: 295227 - DNA, 21 bp, Artificial sequence
  SiRNA target sequence
agtatgggaagcgccattgtg

SEQ ID NO: 295228 - DNA, 21 bp, Artificial sequence
  SiRNA target sequence
gtatgggaagcgccattgtgt

SEQ ID NO: 295229 - DNA, 21 bp, Artificial sequence
  SiRNA target sequence
tatgggaagcgccattgtgta

SEQ ID NO: 295230 - DNA, 21 bp, Artificial sequence
  SiRNA target sequence
atgggaagcgccattgtgtat

SEQ ID NO: 295231 - DNA, 21 bp, Artificial sequence
  SiRNA target sequence
tgggaagcgccattgtgtatg

SEQ ID NO: 295232 - DNA, 21 bp, Artificial sequence
  SiRNA target sequence
gggaagcgccattgtgtatgg

SEQ ID NO: 295233 - DNA, 21 bp, Artificial sequence
  SiRNA target sequence
ggaagcgccattgtgtatgga

SEQ ID NO: 295234 - DNA, 21 bp, Artificial sequence
  SiRNA target sequence
gaagcgccattgtgtatggac

SEQ ID NO: 295235 - DNA, 21 bp, Artificial sequence
  SiRNA target sequence
aagcgccattgtgtatggaca

SEQ ID NO: 295236 - DNA, 21 bp, Artificial sequence
  SiRNA target sequence
agcgccattgtgtatggacac

SEQ ID NO: 295237 - DNA, 21 bp, Artificial sequence
  SiRNA target sequence
gcgccattgtgtatggacaca

SEQ ID NO: 295238 - DNA, 21 bp, Artificial sequence
  SiRNA target sequence
cgccattgtgtatggacacaa

SEQ ID NO: 295239 - DNA, 21 bp, Artificial sequence
  SiRNA target sequence
gccattgtgtatggacacaat

SEQ ID NO: 295240 - DNA, 21 bp, Artificial sequence
  SiRNA target sequence
ccattgtgtatggacacaata

SEQ ID NO: 295241 - DNA, 21 bp, Artificial sequence
  SiRNA target sequence
cattgtgtatggacacaatac

SEQ ID NO: 295242 - DNA, 21 bp, Artificial sequence
  SiRNA target sequence
attgtgtatggacacaatact

SEQ ID NO: 295243 - DNA, 21 bp, Artificial sequence
  SiRNA target sequence
ttgtgtatggacacaatactg

SEQ ID NO: 295244 - DNA, 21 bp, Artificial sequence
  SiRNA target sequence
tgtgtatggacacaatactgg

SEQ ID NO: 295245 - DNA, 21 bp, Artificial sequence
  SiRNA target sequence
gtgtatggacacaatactgga

SEQ ID NO: 295246 - DNA, 21 bp, Artificial sequence
  SiRNA target sequence
tgtatggacacaatactggaa

SEQ ID NO: 295247 - DNA, 21 bp, Artificial sequence
  SiRNA target sequence
gtatggacacaatactggaaa

SEQ ID NO: 295248 - DNA, 21 bp, Artificial sequence
  SiRNA target sequence
tatggacacaatactggaaat

SEQ ID NO: 295249 - DNA, 21 bp, Artificial sequence
  SiRNA target sequence
atggacacaatactggaaatg

SEQ ID NO: 295250 - DNA, 21 bp, Artificial sequence
  SiRNA target sequence
tggacacaatactggaaatgc

SEQ ID NO: 295251 - DNA, 21 bp, Artificial sequence
  SiRNA target sequence
ggacacaatactggaaatgcc

SEQ ID NO: 295252 - DNA, 21 bp, Artificial sequence
  SiRNA target sequence
gacacaatactggaaatgcct

SEQ ID NO: 295253 - DNA, 21 bp, Artificial sequence
  SiRNA target sequence
acacaatactggaaatgccta

SEQ ID NO: 295254 - DNA, 21 bp, Artificial sequence
  SiRNA target sequence
cacaatactggaaatgcctaa

SEQ ID NO: 295255 - DNA, 21 bp, Artificial sequence
  SiRNA target sequence
acaatactggaaatgcctaat

SEQ ID NO: 295256 - DNA, 21 bp, Artificial sequence
  SiRNA target sequence
caatactggaaatgcctaatt

SEQ ID NO: 295257 - DNA, 21 bp, Artificial sequence
  SiRNA target sequence
aatactggaaatgcctaattg

SEQ ID NO: 295258 - DNA, 21 bp, Artificial sequence
  SiRNA target sequence
atactggaaatgcctaattgg

SEQ ID NO: 295259 - DNA, 21 bp, Artificial sequence
  SiRNA target sequence
tactggaaatgcctaattggt

SEQ ID NO: 295260 - DNA, 21 bp, Artificial sequence
  SiRNA target sequence
actggaaatgcctaattggtg

SEQ ID NO: 295261 - DNA, 21 bp, Artificial sequence
  SiRNA target sequence
ctggaaatgcctaattggtgt

SEQ ID NO: 295262 - DNA, 21 bp, Artificial sequence
  SiRNA target sequence
tggaaatgcctaattggtgtc

SEQ ID NO: 295263 - DNA, 21 bp, Artificial sequence
  SiRNA target sequence
ggaaatgcctaattggtgtcg

SEQ ID NO: 295264 - DNA, 21 bp, Artificial sequence
  SiRNA target sequence
gaaatgcctaattggtgtcga

SEQ ID NO: 295265 - DNA, 21 bp, Artificial sequence
  SiRNA target sequence
aaatgcctaattggtgtcgag

SEQ ID NO: 295266 - DNA, 21 bp, Artificial sequence
  SiRNA target sequence
aatgcctaattggtgtcgagg

SEQ ID NO: 295267 - DNA, 21 bp, Artificial sequence
  SiRNA target sequence
atgcctaattggtgtcgagga

SEQ ID NO: 295268 - DNA, 21 bp, Artificial sequence
  SiRNA target sequence
tgcctaattggtgtcgaggaa

SEQ ID NO: 295269 - DNA, 21 bp, Artificial sequence
  SiRNA target sequence
gcctaattggtgtcgaggaag

SEQ ID NO: 295270 - DNA, 21 bp, Artificial sequence
  SiRNA target sequence
cctaattggtgtcgaggaagt

SEQ ID NO: 295271 - DNA, 21 bp, Artificial sequence
  SiRNA target sequence
ctaattggtgtcgaggaagtc

SEQ ID NO: 295272 - DNA, 21 bp, Artificial sequence
  SiRNA target sequence
taattggtgtcgaggaagtct

SEQ ID NO: 295273 - DNA, 21 bp, Artificial sequence
  SiRNA target sequence
aattggtgtcgaggaagtctc

SEQ ID NO: 295274 - DNA, 21 bp, Artificial sequence
  SiRNA target sequence
attggtgtcgaggaagtctcg

SEQ ID NO: 295275 - DNA, 21 bp, Artificial sequence
  SiRNA target sequence
ttggtgtcgaggaagtctcga

SEQ ID NO: 295276 - DNA, 21 bp, Artificial sequence
  SiRNA target sequence
tggtgtcgaggaagtctcgac

SEQ ID NO: 295277 - DNA, 21 bp, Artificial sequence
  SiRNA target sequence
ggtgtcgaggaagtctcgaca

SEQ ID NO: 295278 - DNA, 21 bp, Artificial sequence
  SiRNA target sequence
gtgtcgaggaagtctcgacat

SEQ ID NO: 295279 - DNA, 21 bp, Artificial sequence
  SiRNA target sequence
tgtcgaggaagtctcgacatt

SEQ ID NO: 295280 - DNA, 21 bp, Artificial sequence
  SiRNA target sequence
gtcgaggaagtctcgacattc

SEQ ID NO: 295281 - DNA, 21 bp, Artificial sequence
  SiRNA target sequence
tcgaggaagtctcgacattca

SEQ ID NO: 295282 - DNA, 21 bp, Artificial sequence
  SiRNA target sequence
cgaggaagtctcgacattcaa

SEQ ID NO: 295283 - DNA, 21 bp, Artificial sequence
  SiRNA target sequence
gaggaagtctcgacattcaag

SEQ ID NO: 295284 - DNA, 21 bp, Artificial sequence
  SiRNA target sequence
aggaagtctcgacattcaaga

SEQ ID NO: 295285 - DNA, 21 bp, Artificial sequence
  SiRNA target sequence
ggaagtctcgacattcaagaa

SEQ ID NO: 295286 - DNA, 21 bp, Artificial sequence
  SiRNA target sequence
gaagtctcgacattcaagaag

SEQ ID NO: 295287 - DNA, 21 bp, Artificial sequence
  SiRNA target sequence
aagtctcgacattcaagaagg

SEQ ID NO: 295288 - DNA, 21 bp, Artificial sequence
  SiRNA target sequence
agtctcgacattcaagaagga

SEQ ID NO: 295289 - DNA, 21 bp, Artificial sequence
  SiRNA target sequence
gtctcgacattcaagaaggaa

SEQ ID NO: 295290 - DNA, 21 bp, Artificial sequence
  SiRNA target sequence
tctcgacattcaagaaggaac

SEQ ID NO: 295291 - DNA, 21 bp, Artificial sequence
  SiRNA target sequence
ctcgacattcaagaaggaact

SEQ ID NO: 295292 - DNA, 21 bp, Artificial sequence
  SiRNA target sequence
tcgacattcaagaaggaacta

SEQ ID NO: 295293 - DNA, 21 bp, Artificial sequence
  SiRNA target sequence
cgacattcaagaaggaactaa

SEQ ID NO: 295294 - DNA, 21 bp, Artificial sequence
  SiRNA target sequence
gacattcaagaaggaactaaa

SEQ ID NO: 295295 - DNA, 21 bp, Artificial sequence
  SiRNA target sequence
acattcaagaaggaactaaag

SEQ ID NO: 295296 - DNA, 21 bp, Artificial sequence
  SiRNA target sequence
cattcaagaaggaactaaagt

SEQ ID NO: 295297 - DNA, 21 bp, Artificial sequence
  SiRNA target sequence
attcaagaaggaactaaagtt

SEQ ID NO: 295298 - DNA, 21 bp, Artificial sequence
  SiRNA target sequence
ttcaagaaggaactaaagtta

SEQ ID NO: 295299 - DNA, 21 bp, Artificial sequence
  SiRNA target sequence
tcaagaaggaactaaagttaa

SEQ ID NO: 295300 - DNA, 21 bp, Artificial sequence
  SiRNA target sequence
caagaaggaactaaagttaat

SEQ ID NO: 295301 - DNA, 21 bp, Artificial sequence
  SiRNA target sequence
aagaaggaactaaagttaatt

SEQ ID NO: 295302 - DNA, 21 bp, Artificial sequence
  SiRNA target sequence
agaaggaactaaagttaattg

SEQ ID NO: 295303 - DNA, 21 bp, Artificial sequence
  SiRNA target sequence
gaaggaactaaagttaattgt

SEQ ID NO: 295304 - DNA, 21 bp, Artificial sequence
  SiRNA target sequence
aaggaactaaagttaattgtg

SEQ ID NO: 295305 - DNA, 21 bp, Artificial sequence
  SiRNA target sequence
aggaactaaagttaattgtga

SEQ ID NO: 295306 - DNA, 21 bp, Artificial sequence
  SiRNA target sequence
ggaactaaagttaattgtgaa

SEQ ID NO: 295307 - DNA, 21 bp, Artificial sequence
  SiRNA target sequence
gaactaaagttaattgtgaaa

SEQ ID NO: 295308 - DNA, 21 bp, Artificial sequence
  SiRNA target sequence
aactaaagttaattgtgaaaa

SEQ ID NO: 295309 - DNA, 21 bp, Artificial sequence
  SiRNA target sequence
actaaagttaattgtgaaaat

SEQ ID NO: 295310 - DNA, 21 bp, Artificial sequence
  SiRNA target sequence
ctaaagttaattgtgaaaatg

SEQ ID NO: 295311 - DNA, 21 bp, Artificial sequence
  SiRNA target sequence
taaagttaattgtgaaaatgc

SEQ ID NO: 295312 - DNA, 21 bp, Artificial sequence
  SiRNA target sequence
aaagttaattgtgaaaatgca

SEQ ID NO: 295313 - DNA, 21 bp, Artificial sequence
  SiRNA target sequence
aagttaattgtgaaaatgcaa

SEQ ID NO: 295314 - DNA, 21 bp, Artificial sequence
  SiRNA target sequence
agttaattgtgaaaatgcaat

SEQ ID NO: 295315 - DNA, 21 bp, Artificial sequence
  SiRNA target sequence
gttaattgtgaaaatgcaatt

SEQ ID NO: 295316 - DNA, 21 bp, Artificial sequence
  SiRNA target sequence
ttaattgtgaaaatgcaatta

SEQ ID NO: 295317 - DNA, 21 bp, Artificial sequence
  SiRNA target sequence
taattgtgaaaatgcaattat

SEQ ID NO: 295318 - DNA, 21 bp, Artificial sequence
  SiRNA target sequence
aattgtgaaaatgcaattatg

SEQ ID NO: 295319 - DNA, 21 bp, Artificial sequence
  SiRNA target sequence
attgtgaaaatgcaattatgg

SEQ ID NO: 295320 - DNA, 21 bp, Artificial sequence
  SiRNA target sequence
ttgtgaaaatgcaattatgga

SEQ ID NO: 295321 - DNA, 21 bp, Artificial sequence
  SiRNA target sequence
tgtgaaaatgcaattatggag

SEQ ID NO: 295322 - DNA, 21 bp, Artificial sequence
  SiRNA target sequence
gtgaaaatgcaattatggagc

SEQ ID NO: 295323 - DNA, 21 bp, Artificial sequence
  SiRNA target sequence
tgaaaatgcaattatggagct

SEQ ID NO: 295324 - DNA, 21 bp, Artificial sequence
  SiRNA target sequence
gaaaatgcaattatggagctt

SEQ ID NO: 295325 - DNA, 21 bp, Artificial sequence
  SiRNA target sequence
aaaatgcaattatggagcttt

SEQ ID NO: 295326 - DNA, 21 bp, Artificial sequence
  SiRNA target sequence
aaatgcaattatggagctttc

SEQ ID NO: 295327 - DNA, 21 bp, Artificial sequence
  SiRNA target sequence
aatgcaattatggagctttct

SEQ ID NO: 295328 - DNA, 21 bp, Artificial sequence
  SiRNA target sequence
atgcaattatggagctttcta

SEQ ID NO: 295329 - DNA, 21 bp, Artificial sequence
  SiRNA target sequence
tgcaattatggagctttctat

SEQ ID NO: 295330 - DNA, 21 bp, Artificial sequence
  SiRNA target sequence
gcaattatggagctttctatg

SEQ ID NO: 295331 - DNA, 21 bp, Artificial sequence
  SiRNA target sequence
caattatggagctttctatgc

SEQ ID NO: 295332 - DNA, 21 bp, Artificial sequence
  SiRNA target sequence
aattatggagctttctatgca

SEQ ID NO: 295333 - DNA, 21 bp, Artificial sequence
  SiRNA target sequence
attatggagctttctatgcat

SEQ ID NO: 295334 - DNA, 21 bp, Artificial sequence
  SiRNA target sequence
ttatggagctttctatgcatg

SEQ ID NO: 295335 - DNA, 21 bp, Artificial sequence
  SiRNA target sequence
tatggagctttctatgcatga

SEQ ID NO: 295336 - DNA, 21 bp, Artificial sequence
  SiRNA target sequence
atggagctttctatgcatgag

SEQ ID NO: 295337 - DNA, 21 bp, Artificial sequence
  SiRNA target sequence
tggagctttctatgcatgagg

SEQ ID NO: 295338 - DNA, 21 bp, Artificial sequence
  SiRNA target sequence
ggagctttctatgcatgagga

SEQ ID NO: 295339 - DNA, 21 bp, Artificial sequence
  SiRNA target sequence
gagctttctatgcatgaggaa

SEQ ID NO: 295340 - DNA, 21 bp, Artificial sequence
  SiRNA target sequence
agctttctatgcatgaggaat

SEQ ID NO: 295341 - DNA, 21 bp, Artificial sequence
  SiRNA target sequence
gctttctatgcatgaggaata

SEQ ID NO: 295342 - DNA, 21 bp, Artificial sequence
  SiRNA target sequence
ctttctatgcatgaggaatat

SEQ ID NO: 295343 - DNA, 21 bp, Artificial sequence
  SiRNA target sequence
tttctatgcatgaggaatatg

SEQ ID NO: 295344 - DNA, 21 bp, Artificial sequence
  SiRNA target sequence
ttctatgcatgaggaatatgt

SEQ ID NO: 295345 - DNA, 21 bp, Artificial sequence
  SiRNA target sequence
tctatgcatgaggaatatgta

SEQ ID NO: 295346 - DNA, 21 bp, Artificial sequence
  SiRNA target sequence
ctatgcatgaggaatatgtat

SEQ ID NO: 295347 - DNA, 21 bp, Artificial sequence
  SiRNA target sequence
tatgcatgaggaatatgtatt

SEQ ID NO: 295348 - DNA, 21 bp, Artificial sequence
  SiRNA target sequence
atgcatgaggaatatgtattt

SEQ ID NO: 295349 - DNA, 21 bp, Artificial sequence
  SiRNA target sequence
tgcatgaggaatatgtatttg

SEQ ID NO: 295350 - DNA, 21 bp, Artificial sequence
  SiRNA target sequence
gcatgaggaatatgtatttga

SEQ ID NO: 295351 - DNA, 21 bp, Artificial sequence
  SiRNA target sequence
catgaggaatatgtatttgat

SEQ ID NO: 295352 - DNA, 21 bp, Artificial sequence
  SiRNA target sequence
atgaggaatatgtatttgata

SEQ ID NO: 295353 - DNA, 21 bp, Artificial sequence
  SiRNA target sequence
tgaggaatatgtatttgataa

SEQ ID NO: 295354 - DNA, 21 bp, Artificial sequence
  SiRNA target sequence
gaggaatatgtatttgataag

SEQ ID NO: 295355 - DNA, 21 bp, Artificial sequence
  SiRNA target sequence
aggaatatgtatttgataagt

SEQ ID NO: 295356 - DNA, 21 bp, Artificial sequence
  SiRNA target sequence
ggaatatgtatttgataagtg

SEQ ID NO: 295357 - DNA, 21 bp, Artificial sequence
  SiRNA target sequence
gaatatgtatttgataagtgg

SEQ ID NO: 295358 - DNA, 21 bp, Artificial sequence
  SiRNA target sequence
aatatgtatttgataagtggt

SEQ ID NO: 295359 - DNA, 21 bp, Artificial sequence
  SiRNA target sequence
atatgtatttgataagtggtc

SEQ ID NO: 295360 - DNA, 21 bp, Artificial sequence
  SiRNA target sequence
tatgtatttgataagtggtcc

SEQ ID NO: 295361 - DNA, 21 bp, Artificial sequence
  SiRNA target sequence
atgtatttgataagtggtcca

SEQ ID NO: 295362 - DNA, 21 bp, Artificial sequence
  SiRNA target sequence
tgtatttgataagtggtccaa

SEQ ID NO: 295363 - DNA, 21 bp, Artificial sequence
  SiRNA target sequence
gtatttgataagtggtccaaa

SEQ ID NO: 295364 - DNA, 21 bp, Artificial sequence
  SiRNA target sequence
tatttgataagtggtccaaag

SEQ ID NO: 295365 - DNA, 21 bp, Artificial sequence
  SiRNA target sequence
atttgataagtggtccaaagt

SEQ ID NO: 295366 - DNA, 21 bp, Artificial sequence
  SiRNA target sequence
tttgataagtggtccaaagtg

SEQ ID NO: 295367 - DNA, 21 bp, Artificial sequence
  SiRNA target sequence
ttgataagtggtccaaagtga

SEQ ID NO: 295368 - DNA, 21 bp, Artificial sequence
  SiRNA target sequence
tgataagtggtccaaagtgat

SEQ ID NO: 295369 - DNA, 21 bp, Artificial sequence
  SiRNA target sequence
gataagtggtccaaagtgatt

SEQ ID NO: 295370 - DNA, 21 bp, Artificial sequence
  SiRNA target sequence
ataagtggtccaaagtgattt

SEQ ID NO: 295371 - DNA, 21 bp, Artificial sequence
  SiRNA target sequence
taagtggtccaaagtgatttc

SEQ ID NO: 295372 - DNA, 21 bp, Artificial sequence
  SiRNA target sequence
aagtggtccaaagtgatttct

SEQ ID NO: 295373 - DNA, 21 bp, Artificial sequence
  SiRNA target sequence
agtggtccaaagtgatttcta

SEQ ID NO: 295374 - DNA, 21 bp, Artificial sequence
  SiRNA target sequence
gtggtccaaagtgatttctaa

SEQ ID NO: 295375 - DNA, 21 bp, Artificial sequence
  SiRNA target sequence
tggtccaaagtgatttctaag

SEQ ID NO: 295376 - DNA, 21 bp, Artificial sequence
  SiRNA target sequence
ggtccaaagtgatttctaagg

SEQ ID NO: 295377 - DNA, 21 bp, Artificial sequence
  SiRNA target sequence
gtccaaagtgatttctaaggc

SEQ ID NO: 295378 - DNA, 21 bp, Artificial sequence
  SiRNA target sequence
tccaaagtgatttctaaggcc

SEQ ID NO: 295379 - DNA, 21 bp, Artificial sequence
  SiRNA target sequence
ccaaagtgatttctaaggcct

SEQ ID NO: 295380 - DNA, 21 bp, Artificial sequence
  SiRNA target sequence
caaagtgatttctaaggccta

SEQ ID NO: 295381 - DNA, 21 bp, Artificial sequence
  SiRNA target sequence
aaagtgatttctaaggcctat

SEQ ID NO: 295382 - DNA, 21 bp, Artificial sequence
  SiRNA target sequence
aagtgatttctaaggcctatc

SEQ ID NO: 295383 - DNA, 21 bp, Artificial sequence
  SiRNA target sequence
agtgatttctaaggcctatca

SEQ ID NO: 295384 - DNA, 21 bp, Artificial sequence
  SiRNA target sequence
gtgatttctaaggcctatcag

SEQ ID NO: 295385 - DNA, 21 bp, Artificial sequence
  SiRNA target sequence
tgatttctaaggcctatcaga

SEQ ID NO: 295386 - DNA, 21 bp, Artificial sequence
  SiRNA target sequence
gatttctaaggcctatcagaa

SEQ ID NO: 295387 - DNA, 21 bp, Artificial sequence
  SiRNA target sequence
atttctaaggcctatcagaag

SEQ ID NO: 295388 - DNA, 21 bp, Artificial sequence
  SiRNA target sequence
tttctaaggcctatcagaagg

SEQ ID NO: 295389 - DNA, 21 bp, Artificial sequence
  SiRNA target sequence
ttctaaggcctatcagaaggc

SEQ ID NO: 295390 - DNA, 21 bp, Artificial sequence
  SiRNA target sequence
tctaaggcctatcagaaggcc

SEQ ID NO: 295391 - DNA, 21 bp, Artificial sequence
  SiRNA target sequence
ctaaggcctatcagaaggcca

SEQ ID NO: 295392 - DNA, 21 bp, Artificial sequence
  SiRNA target sequence
taaggcctatcagaaggccac

SEQ ID NO: 295393 - DNA, 21 bp, Artificial sequence
  SiRNA target sequence
aaggcctatcagaaggccact

SEQ ID NO: 295394 - DNA, 21 bp, Artificial sequence
  SiRNA target sequence
aggcctatcagaaggccactg

SEQ ID NO: 295395 - DNA, 21 bp, Artificial sequence
  SiRNA target sequence
ggcctatcagaaggccactgg

SEQ ID NO: 295396 - DNA, 21 bp, Artificial sequence
  SiRNA target sequence
gcctatcagaaggccactgga

SEQ ID NO: 295397 - DNA, 21 bp, Artificial sequence
  SiRNA target sequence
cctatcagaaggccactggag

SEQ ID NO: 295398 - DNA, 21 bp, Artificial sequence
  SiRNA target sequence
ctatcagaaggccactggaga

SEQ ID NO: 295399 - DNA, 21 bp, Artificial sequence
  SiRNA target sequence
tatcagaaggccactggagat

SEQ ID NO: 295400 - DNA, 21 bp, Artificial sequence
  SiRNA target sequence
atcagaaggccactggagatt

SEQ ID NO: 295401 - DNA, 21 bp, Artificial sequence
  SiRNA target sequence
tcagaaggccactggagattg

SEQ ID NO: 295402 - DNA, 21 bp, Artificial sequence
  SiRNA target sequence
cagaaggccactggagattgt

SEQ ID NO: 295403 - DNA, 21 bp, Artificial sequence
  SiRNA target sequence
agaaggccactggagattgtt

SEQ ID NO: 295404 - DNA, 21 bp, Artificial sequence
  SiRNA target sequence
gaaggccactggagattgttt

SEQ ID NO: 295405 - DNA, 21 bp, Artificial sequence
  SiRNA target sequence
aaggccactggagattgtttg

SEQ ID NO: 295406 - DNA, 21 bp, Artificial sequence
  SiRNA target sequence
aggccactggagattgtttgg

SEQ ID NO: 295407 - DNA, 21 bp, Artificial sequence
  SiRNA target sequence
ggccactggagattgtttgga

SEQ ID NO: 295408 - DNA, 21 bp, Artificial sequence
  SiRNA target sequence
gccactggagattgtttggat

SEQ ID NO: 295409 - DNA, 21 bp, Artificial sequence
  SiRNA target sequence
ccactggagattgtttggata

SEQ ID NO: 295410 - DNA, 21 bp, Artificial sequence
  SiRNA target sequence
cactggagattgtttggatat

SEQ ID NO: 295411 - DNA, 21 bp, Artificial sequence
  SiRNA target sequence
actggagattgtttggatatc

SEQ ID NO: 295412 - DNA, 21 bp, Artificial sequence
  SiRNA target sequence
ctggagattgtttggatatca

SEQ ID NO: 295413 - DNA, 21 bp, Artificial sequence
  SiRNA target sequence
tggagattgtttggatatcag

SEQ ID NO: 295414 - DNA, 21 bp, Artificial sequence
  SiRNA target sequence
ggagattgtttggatatcagt

SEQ ID NO: 295415 - DNA, 21 bp, Artificial sequence
  SiRNA target sequence
gagattgtttggatatcagta

SEQ ID NO: 295416 - DNA, 21 bp, Artificial sequence
  SiRNA target sequence
agattgtttggatatcagtac

SEQ ID NO: 295417 - DNA, 21 bp, Artificial sequence
  SiRNA target sequence
gattgtttggatatcagtaca

SEQ ID NO: 295418 - DNA, 21 bp, Artificial sequence
  SiRNA target sequence
attgtttggatatcagtacat

SEQ ID NO: 295419 - DNA, 21 bp, Artificial sequence
  SiRNA target sequence
ttgtttggatatcagtacata

SEQ ID NO: 295420 - DNA, 21 bp, Artificial sequence
  SiRNA target sequence
tgtttggatatcagtacatat

SEQ ID NO: 295421 - DNA, 21 bp, Artificial sequence
  SiRNA target sequence
gtttggatatcagtacatata

SEQ ID NO: 295422 - DNA, 21 bp, Artificial sequence
  SiRNA target sequence
tttggatatcagtacatataa

SEQ ID NO: 295423 - DNA, 21 bp, Artificial sequence
  SiRNA target sequence
ttggatatcagtacatataat

SEQ ID NO: 295424 - DNA, 21 bp, Artificial sequence
  SiRNA target sequence
tggatatcagtacatataatg

SEQ ID NO: 295425 - DNA, 21 bp, Artificial sequence
  SiRNA target sequence
ggatatcagtacatataatgg

SEQ ID NO: 295426 - DNA, 21 bp, Artificial sequence
  SiRNA target sequence
gatatcagtacatataatggt

SEQ ID NO: 295427 - DNA, 21 bp, Artificial sequence
  SiRNA target sequence
atatcagtacatataatggtt

SEQ ID NO: 295428 - DNA, 21 bp, Artificial sequence
  SiRNA target sequence
tatcagtacatataatggtta

SEQ ID NO: 295429 - DNA, 21 bp, Artificial sequence
  SiRNA target sequence
atcagtacatataatggttat

SEQ ID NO: 295430 - DNA, 21 bp, Artificial sequence
  SiRNA target sequence
tcagtacatataatggttatg

SEQ ID NO: 295431 - DNA, 21 bp, Artificial sequence
  SiRNA target sequence
cagtacatataatggttatgc

SEQ ID NO: 295432 - DNA, 21 bp, Artificial sequence
  SiRNA target sequence
agtacatataatggttatgct

SEQ ID NO: 295433 - DNA, 21 bp, Artificial sequence
  SiRNA target sequence
gtacatataatggttatgctc

SEQ ID NO: 295434 - DNA, 21 bp, Artificial sequence
  SiRNA target sequence
tacatataatggttatgctca

SEQ ID NO: 295435 - DNA, 21 bp, Artificial sequence
  SiRNA target sequence
acatataatggttatgctcag

SEQ ID NO: 295436 - DNA, 21 bp, Artificial sequence
  SiRNA target sequence
catataatggttatgctcagg

SEQ ID NO: 295437 - DNA, 21 bp, Artificial sequence
  SiRNA target sequence
atataatggttatgctcagga

SEQ ID NO: 295438 - DNA, 21 bp, Artificial sequence
  SiRNA target sequence
tataatggttatgctcaggag

SEQ ID NO: 295439 - DNA, 21 bp, Artificial sequence
  SiRNA target sequence
ataatggttatgctcaggaga

SEQ ID NO: 295440 - DNA, 21 bp, Artificial sequence
  SiRNA target sequence
taatggttatgctcaggagag

SEQ ID NO: 295441 - DNA, 21 bp, Artificial sequence
  SiRNA target sequence
aatggttatgctcaggagaga

SEQ ID NO: 295442 - DNA, 21 bp, Artificial sequence
  SiRNA target sequence
atggttatgctcaggagagat

SEQ ID NO: 295443 - DNA, 21 bp, Artificial sequence
  SiRNA target sequence
tggttatgctcaggagagatt

SEQ ID NO: 295444 - DNA, 21 bp, Artificial sequence
  SiRNA target sequence
ggttatgctcaggagagattc

SEQ ID NO: 295445 - DNA, 21 bp, Artificial sequence
  SiRNA target sequence
gttatgctcaggagagattcc

SEQ ID NO: 295446 - DNA, 21 bp, Artificial sequence
  SiRNA target sequence
ttatgctcaggagagattcct

SEQ ID NO: 295447 - DNA, 21 bp, Artificial sequence
  SiRNA target sequence
tatgctcaggagagattccta

SEQ ID NO: 295448 - DNA, 21 bp, Artificial sequence
  SiRNA target sequence
atgctcaggagagattcctaa

SEQ ID NO: 295449 - DNA, 21 bp, Artificial sequence
  SiRNA target sequence
tgctcaggagagattcctaaa

SEQ ID NO: 295450 - DNA, 21 bp, Artificial sequence
  SiRNA target sequence
gctcaggagagattcctaaat

SEQ ID NO: 295451 - DNA, 21 bp, Artificial sequence
  SiRNA target sequence
ctcaggagagattcctaaatt

SEQ ID NO: 295452 - DNA, 21 bp, Artificial sequence
  SiRNA target sequence
tcaggagagattcctaaatta

SEQ ID NO: 295453 - DNA, 21 bp, Artificial sequence
  SiRNA target sequence
caggagagattcctaaattac

SEQ ID NO: 295454 - DNA, 21 bp, Artificial sequence
  SiRNA target sequence
aggagagattcctaaattact

SEQ ID NO: 295455 - DNA, 21 bp, Artificial sequence
  SiRNA target sequence
ggagagattcctaaattacta

SEQ ID NO: 295456 - DNA, 21 bp, Artificial sequence
  SiRNA target sequence
gagagattcctaaattactac

SEQ ID NO: 295457 - DNA, 21 bp, Artificial sequence
  SiRNA target sequence
agagattcctaaattactact

SEQ ID NO: 295458 - DNA, 21 bp, Artificial sequence
  SiRNA target sequence
gagattcctaaattactactt

SEQ ID NO: 295459 - DNA, 21 bp, Artificial sequence
  SiRNA target sequence
agattcctaaattactacttg

SEQ ID NO: 295460 - DNA, 21 bp, Artificial sequence
  SiRNA target sequence
gattcctaaattactacttgt

SEQ ID NO: 295461 - DNA, 21 bp, Artificial sequence
  SiRNA target sequence
attcctaaattactacttgta

SEQ ID NO: 295462 - DNA, 21 bp, Artificial sequence
  SiRNA target sequence
ttcctaaattactacttgtaa

SEQ ID NO: 295463 - DNA, 21 bp, Artificial sequence
  SiRNA target sequence
tcctaaattactacttgtaat

SEQ ID NO: 295464 - DNA, 21 bp, Artificial sequence
  SiRNA target sequence
cctaaattactacttgtaatt

SEQ ID NO: 295465 - DNA, 21 bp, Artificial sequence
  SiRNA target sequence
ctaaattactacttgtaattt

SEQ ID NO: 295466 - DNA, 21 bp, Artificial sequence
  SiRNA target sequence
taaattactacttgtaatttg

SEQ ID NO: 295467 - DNA, 21 bp, Artificial sequence
  SiRNA target sequence
aaattactacttgtaatttgg

SEQ ID NO: 295468 - DNA, 21 bp, Artificial sequence
  SiRNA target sequence
aattactacttgtaatttggg

SEQ ID NO: 295469 - DNA, 21 bp, Artificial sequence
  SiRNA target sequence
attactacttgtaatttggga

SEQ ID NO: 295470 - DNA, 21 bp, Artificial sequence
  SiRNA target sequence
ttactacttgtaatttgggaa

SEQ ID NO: 295471 - DNA, 21 bp, Artificial sequence
  SiRNA target sequence
tactacttgtaatttgggaat

SEQ ID NO: 295472 - DNA, 21 bp, Artificial sequence
  SiRNA target sequence
actacttgtaatttgggaatc

SEQ ID NO: 295473 - DNA, 21 bp, Artificial sequence
  SiRNA target sequence
ctacttgtaatttgggaatcg

SEQ ID NO: 295474 - DNA, 21 bp, Artificial sequence
  SiRNA target sequence
tacttgtaatttgggaatcgc

SEQ ID NO: 295475 - DNA, 21 bp, Artificial sequence
  SiRNA target sequence
acttgtaatttgggaatcgca

SEQ ID NO: 295476 - DNA, 21 bp, Artificial sequence
  SiRNA target sequence
cttgtaatttgggaatcgcaa

SEQ ID NO: 295477 - DNA, 21 bp, Artificial sequence
  SiRNA target sequence
ttgtaatttgggaatcgcaac

SEQ ID NO: 295478 - DNA, 21 bp, Artificial sequence
  SiRNA target sequence
tgtaatttgggaatcgcaaca

SEQ ID NO: 295479 - DNA, 21 bp, Artificial sequence
  SiRNA target sequence
gtaatttgggaatcgcaacac

SEQ ID NO: 295480 - DNA, 21 bp, Artificial sequence
  SiRNA target sequence
taatttgggaatcgcaacaca

SEQ ID NO: 295481 - DNA, 21 bp, Artificial sequence
  SiRNA target sequence
aatttgggaatcgcaacacaa

SEQ ID NO: 295482 - DNA, 21 bp, Artificial sequence
  SiRNA target sequence
atttgggaatcgcaacacaac

SEQ ID NO: 295483 - DNA, 21 bp, Artificial sequence
  SiRNA target sequence
tttgggaatcgcaacacaaca

SEQ ID NO: 295484 - DNA, 21 bp, Artificial sequence
  SiRNA target sequence
ttgggaatcgcaacacaacat

SEQ ID NO: 295485 - DNA, 21 bp, Artificial sequence
  SiRNA target sequence
tgggaatcgcaacacaacatg

SEQ ID NO: 295486 - DNA, 21 bp, Artificial sequence
  SiRNA target sequence
gggaatcgcaacacaacatgg

SEQ ID NO: 295487 - DNA, 21 bp, Artificial sequence
  SiRNA target sequence
ggaatcgcaacacaacatggt

SEQ ID NO: 295488 - DNA, 21 bp, Artificial sequence
  SiRNA target sequence
gaatcgcaacacaacatggtt

SEQ ID NO: 295489 - DNA, 21 bp, Artificial sequence
  SiRNA target sequence
aatcgcaacacaacatggtta

SEQ ID NO: 295490 - DNA, 21 bp, Artificial sequence
  SiRNA target sequence
atcgcaacacaacatggttac

SEQ ID NO: 295491 - DNA, 21 bp, Artificial sequence
  SiRNA target sequence
tcgcaacacaacatggttacc

SEQ ID NO: 295492 - DNA, 21 bp, Artificial sequence
  SiRNA target sequence
cgcaacacaacatggttaccc

SEQ ID NO: 295493 - DNA, 21 bp, Artificial sequence
  SiRNA target sequence
gcaacacaacatggttaccca

SEQ ID NO: 295494 - DNA, 21 bp, Artificial sequence
  SiRNA target sequence
caacacaacatggttacccat

SEQ ID NO: 295495 - DNA, 21 bp, Artificial sequence
  SiRNA target sequence
aacacaacatggttacccata

SEQ ID NO: 295496 - DNA, 21 bp, Artificial sequence
  SiRNA target sequence
acacaacatggttacccatag

SEQ ID NO: 295497 - DNA, 21 bp, Artificial sequence
  SiRNA target sequence
cacaacatggttacccataga

SEQ ID NO: 295498 - DNA, 21 bp, Artificial sequence
  SiRNA target sequence
acaacatggttacccatagat

SEQ ID NO: 295499 - DNA, 21 bp, Artificial sequence
  SiRNA target sequence
caacatggttacccatagatt

SEQ ID NO: 295500 - DNA, 21 bp, Artificial sequence
  SiRNA target sequence
aacatggttacccatagattg

SEQ ID NO: 295501 - DNA, 21 bp, Artificial sequence
  SiRNA target sequence
acatggttacccatagattga

SEQ ID NO: 295502 - DNA, 21 bp, Artificial sequence
  SiRNA target sequence
catggttacccatagattgag

SEQ ID NO: 295503 - DNA, 21 bp, Artificial sequence
  SiRNA target sequence
atggttacccatagattgagg

SEQ ID NO: 295504 - DNA, 21 bp, Artificial sequence
  SiRNA target sequence
tggttacccatagattgagga

SEQ ID NO: 295505 - DNA, 21 bp, Artificial sequence
  SiRNA target sequence
ggttacccatagattgaggaa

SEQ ID NO: 295506 - DNA, 21 bp, Artificial sequence
  SiRNA target sequence
gttacccatagattgaggaaa

SEQ ID NO: 295507 - DNA, 21 bp, Artificial sequence
  SiRNA target sequence
ttacccatagattgaggaaat

SEQ ID NO: 295508 - DNA, 21 bp, Artificial sequence
  SiRNA target sequence
tacccatagattgaggaaatt

SEQ ID NO: 295509 - DNA, 21 bp, Artificial sequence
  SiRNA target sequence
acccatagattgaggaaattt

SEQ ID NO: 295510 - DNA, 21 bp, Artificial sequence
  SiRNA target sequence
cccatagattgaggaaatttc

SEQ ID NO: 295511 - DNA, 21 bp, Artificial sequence
  SiRNA target sequence
ccatagattgaggaaatttcc

SEQ ID NO: 295512 - DNA, 21 bp, Artificial sequence
  SiRNA target sequence
catagattgaggaaatttcca

SEQ ID NO: 295513 - DNA, 21 bp, Artificial sequence
  SiRNA target sequence
atagattgaggaaatttccaa

SEQ ID NO: 295514 - DNA, 21 bp, Artificial sequence
  SiRNA target sequence
tagattgaggaaatttccaat

SEQ ID NO: 295515 - DNA, 21 bp, Artificial sequence
  SiRNA target sequence
agattgaggaaatttccaata

SEQ ID NO: 295516 - DNA, 21 bp, Artificial sequence
  SiRNA target sequence
gattgaggaaatttccaataa

SEQ ID NO: 295517 - DNA, 21 bp, Artificial sequence
  SiRNA target sequence
attgaggaaatttccaataaa

SEQ ID NO: 295518 - DNA, 21 bp, Artificial sequence
  SiRNA target sequence
ttgaggaaatttccaataaac

SEQ ID NO: 295519 - DNA, 21 bp, Artificial sequence
  SiRNA target sequence
tgaggaaatttccaataaact

SEQ ID NO: 295520 - DNA, 21 bp, Artificial sequence
  SiRNA target sequence
gaggaaatttccaataaactc

SEQ ID NO: 295521 - DNA, 21 bp, Artificial sequence
  SiRNA target sequence
aggaaatttccaataaactca

SEQ ID NO: 295522 - DNA, 21 bp, Artificial sequence
  SiRNA target sequence
ggaaatttccaataaactcag

SEQ ID NO: 295523 - DNA, 21 bp, Artificial sequence
  SiRNA target sequence
gaaatttccaataaactcagt

SEQ ID NO: 295524 - DNA, 21 bp, Artificial sequence
  SiRNA target sequence
aaatttccaataaactcagta

SEQ ID NO: 295525 - DNA, 21 bp, Artificial sequence
  SiRNA target sequence
aatttccaataaactcagtat

SEQ ID NO: 295526 - DNA, 21 bp, Artificial sequence
  SiRNA target sequence
atttccaataaactcagtatt

SEQ ID NO: 295527 - DNA, 21 bp, Artificial sequence
  SiRNA target sequence
tttccaataaactcagtatta

SEQ ID NO: 295528 - DNA, 21 bp, Artificial sequence
  SiRNA target sequence
ttccaataaactcagtattaa

SEQ ID NO: 295529 - DNA, 21 bp, Artificial sequence
  SiRNA target sequence
tccaataaactcagtattaag

SEQ ID NO: 295530 - DNA, 21 bp, Artificial sequence
  SiRNA target sequence
ccaataaactcagtattaagg

SEQ ID NO: 295531 - DNA, 21 bp, Artificial sequence
  SiRNA target sequence
caataaactcagtattaaggc

SEQ ID NO: 295532 - DNA, 21 bp, Artificial sequence
  SiRNA target sequence
aataaactcagtattaaggct

SEQ ID NO: 295533 - DNA, 21 bp, Artificial sequence
  SiRNA target sequence
ataaactcagtattaaggctt

SEQ ID NO: 295534 - DNA, 21 bp, Artificial sequence
  SiRNA target sequence
taaactcagtattaaggcttg

SEQ ID NO: 295535 - DNA, 21 bp, Artificial sequence
  SiRNA target sequence
aaactcagtattaaggcttgt

SEQ ID NO: 295536 - DNA, 21 bp, Artificial sequence
  SiRNA target sequence
aactcagtattaaggcttgtt

SEQ ID NO: 295537 - DNA, 21 bp, Artificial sequence
  SiRNA target sequence
actcagtattaaggcttgttg

SEQ ID NO: 295538 - DNA, 21 bp, Artificial sequence
  SiRNA target sequence
ctcagtattaaggcttgttgt

SEQ ID NO: 295539 - DNA, 21 bp, Artificial sequence
  SiRNA target sequence
tcagtattaaggcttgttgtg

SEQ ID NO: 295540 - DNA, 21 bp, Artificial sequence
  SiRNA target sequence
cagtattaaggcttgttgtgt

SEQ ID NO: 295541 - DNA, 21 bp, Artificial sequence
  SiRNA target sequence
agtattaaggcttgttgtgtt

SEQ ID NO: 295542 - DNA, 21 bp, Artificial sequence
  SiRNA target sequence
gtattaaggcttgttgtgttg

SEQ ID NO: 295543 - DNA, 21 bp, Artificial sequence
  SiRNA target sequence
tattaaggcttgttgtgttgg

SEQ ID NO: 295544 - DNA, 21 bp, Artificial sequence
  SiRNA target sequence
attaaggcttgttgtgttgga

SEQ ID NO: 295545 - DNA, 21 bp, Artificial sequence
  SiRNA target sequence
ttaaggcttgttgtgttggac

SEQ ID NO: 295546 - DNA, 21 bp, Artificial sequence
  SiRNA target sequence
taaggcttgttgtgttggaca

SEQ ID NO: 295547 - DNA, 21 bp, Artificial sequence
  SiRNA target sequence
aaggcttgttgtgttggacaa

SEQ ID NO: 295548 - DNA, 21 bp, Artificial sequence
  SiRNA target sequence
aggcttgttgtgttggacaag

SEQ ID NO: 295549 - DNA, 21 bp, Artificial sequence
  SiRNA target sequence
ggcttgttgtgttggacaagg

SEQ ID NO: 295550 - DNA, 21 bp, Artificial sequence
  SiRNA target sequence
gcttgttgtgttggacaaggt

SEQ ID NO: 295551 - DNA, 21 bp, Artificial sequence
  SiRNA target sequence
cttgttgtgttggacaaggtg

SEQ ID NO: 295552 - DNA, 21 bp, Artificial sequence
  SiRNA target sequence
ttgttgtgttggacaaggtgc

SEQ ID NO: 295553 - DNA, 21 bp, Artificial sequence
  SiRNA target sequence
tgttgtgttggacaaggtgcc

SEQ ID NO: 295554 - DNA, 21 bp, Artificial sequence
  SiRNA target sequence
gttgtgttggacaaggtgccc

SEQ ID NO: 295555 - DNA, 21 bp, Artificial sequence
  SiRNA target sequence
ttgtgttggacaaggtgccct

SEQ ID NO: 295556 - DNA, 21 bp, Artificial sequence
  SiRNA target sequence
tgtgttggacaaggtgcccta

SEQ ID NO: 295557 - DNA, 21 bp, Artificial sequence
  SiRNA target sequence
gtgttggacaaggtgccctat

SEQ ID NO: 295558 - DNA, 21 bp, Artificial sequence
  SiRNA target sequence
tgttggacaaggtgccctatt

SEQ ID NO: 295559 - DNA, 21 bp, Artificial sequence
  SiRNA target sequence
gttggacaaggtgccctattt

SEQ ID NO: 295560 - DNA, 21 bp, Artificial sequence
  SiRNA target sequence
ttggacaaggtgccctattta

SEQ ID NO: 295561 - DNA, 21 bp, Artificial sequence
  SiRNA target sequence
tggacaaggtgccctatttag

SEQ ID NO: 295562 - DNA, 21 bp, Artificial sequence
  SiRNA target sequence
ggacaaggtgccctatttagg

SEQ ID NO: 295563 - DNA, 21 bp, Artificial sequence
  SiRNA target sequence
gacaaggtgccctatttaggg

SEQ ID NO: 295564 - DNA, 21 bp, Artificial sequence
  SiRNA target sequence
acaaggtgccctatttagggt

SEQ ID NO: 295565 - DNA, 21 bp, Artificial sequence
  SiRNA target sequence
caaggtgccctatttagggtg

SEQ ID NO: 295566 - DNA, 21 bp, Artificial sequence
  SiRNA target sequence
aaggtgccctatttagggtga

SEQ ID NO: 295567 - DNA, 21 bp, Artificial sequence
  SiRNA target sequence
aggtgccctatttagggtgag

SEQ ID NO: 295568 - DNA, 21 bp, Artificial sequence
  SiRNA target sequence
ggtgccctatttagggtgagg

SEQ ID NO: 295569 - DNA, 21 bp, Artificial sequence
  SiRNA target sequence
gtgccctatttagggtgagga

SEQ ID NO: 295570 - DNA, 21 bp, Artificial sequence
  SiRNA target sequence
tgccctatttagggtgaggag

SEQ ID NO: 295571 - DNA, 21 bp, Artificial sequence
  SiRNA target sequence
gccctatttagggtgaggagc

SEQ ID NO: 295572 - DNA, 21 bp, Artificial sequence
  SiRNA target sequence
ccctatttagggtgaggagcc

SEQ ID NO: 295573 - DNA, 21 bp, Artificial sequence
  SiRNA target sequence
cctatttagggtgaggagcct

SEQ ID NO: 295574 - DNA, 21 bp, Artificial sequence
  SiRNA target sequence
ctatttagggtgaggagcctt

SEQ ID NO: 295575 - DNA, 21 bp, Artificial sequence
  SiRNA target sequence
tatttagggtgaggagcctta

SEQ ID NO: 295576 - DNA, 21 bp, Artificial sequence
  SiRNA target sequence
atttagggtgaggagccttac

SEQ ID NO: 295577 - DNA, 21 bp, Artificial sequence
  SiRNA target sequence
tttagggtgaggagccttact

SEQ ID NO: 295578 - DNA, 21 bp, Artificial sequence
  SiRNA target sequence
ttagggtgaggagccttactg

SEQ ID NO: 295579 - DNA, 21 bp, Artificial sequence
  SiRNA target sequence
tagggtgaggagccttactgg

SEQ ID NO: 295580 - DNA, 21 bp, Artificial sequence
  SiRNA target sequence
agggtgaggagccttactggc

SEQ ID NO: 295581 - DNA, 21 bp, Artificial sequence
  SiRNA target sequence
gggtgaggagccttactggca

SEQ ID NO: 295582 - DNA, 21 bp, Artificial sequence
  SiRNA target sequence
ggtgaggagccttactggcag

SEQ ID NO: 295583 - DNA, 21 bp, Artificial sequence
  SiRNA target sequence
gtgaggagccttactggcagc

SEQ ID NO: 295584 - DNA, 21 bp, Artificial sequence
  SiRNA target sequence
tgaggagccttactggcagcc

SEQ ID NO: 295585 - DNA, 21 bp, Artificial sequence
  SiRNA target sequence
gaggagccttactggcagccc

SEQ ID NO: 295586 - DNA, 21 bp, Artificial sequence
  SiRNA target sequence
aggagccttactggcagcccc

SEQ ID NO: 295587 - DNA, 21 bp, Artificial sequence
  SiRNA target sequence
ggagccttactggcagcccca

SEQ ID NO: 295588 - DNA, 21 bp, Artificial sequence
  SiRNA target sequence
gagccttactggcagccccag

SEQ ID NO: 295589 - DNA, 21 bp, Artificial sequence
  SiRNA target sequence
agccttactggcagccccagt

SEQ ID NO: 295590 - DNA, 21 bp, Artificial sequence
  SiRNA target sequence
gccttactggcagccccagtg

SEQ ID NO: 295591 - DNA, 21 bp, Artificial sequence
  SiRNA target sequence
ccttactggcagccccagtga

SEQ ID NO: 295592 - DNA, 21 bp, Artificial sequence
  SiRNA target sequence
cttactggcagccccagtgaa

SEQ ID NO: 295593 - DNA, 21 bp, Artificial sequence
  SiRNA target sequence
ttactggcagccccagtgaat

SEQ ID NO: 295594 - DNA, 21 bp, Artificial sequence
  SiRNA target sequence
tactggcagccccagtgaatc

SEQ ID NO: 295595 - DNA, 21 bp, Artificial sequence
  SiRNA target sequence
actggcagccccagtgaatcc

SEQ ID NO: 295596 - DNA, 21 bp, Artificial sequence
  SiRNA target sequence
ctggcagccccagtgaatcct

SEQ ID NO: 295597 - DNA, 21 bp, Artificial sequence
  SiRNA target sequence
tggcagccccagtgaatcctc

SEQ ID NO: 295598 - DNA, 21 bp, Artificial sequence
  SiRNA target sequence
ggcagccccagtgaatcctcc

SEQ ID NO: 295599 - DNA, 21 bp, Artificial sequence
  SiRNA target sequence
gcagccccagtgaatcctcca

SEQ ID NO: 295600 - DNA, 21 bp, Artificial sequence
  SiRNA target sequence
cagccccagtgaatcctccat

SEQ ID NO: 295601 - DNA, 21 bp, Artificial sequence
  SiRNA target sequence
agccccagtgaatcctccatt

SEQ ID NO: 295602 - DNA, 21 bp, Artificial sequence
  SiRNA target sequence
gccccagtgaatcctccattg

SEQ ID NO: 295603 - DNA, 21 bp, Artificial sequence
  SiRNA target sequence
ccccagtgaatcctccattgg

SEQ ID NO: 295604 - DNA, 21 bp, Artificial sequence
  SiRNA target sequence
cccagtgaatcctccattgga

SEQ ID NO: 295605 - DNA, 21 bp, Artificial sequence
  SiRNA target sequence
ccagtgaatcctccattggat

SEQ ID NO: 295606 - DNA, 21 bp, Artificial sequence
  SiRNA target sequence
cagtgaatcctccattggata

SEQ ID NO: 295607 - DNA, 21 bp, Artificial sequence
  SiRNA target sequence
agtgaatcctccattggatag

SEQ ID NO: 295608 - DNA, 21 bp, Artificial sequence
  SiRNA target sequence
gtgaatcctccattggatagg

SEQ ID NO: 295609 - DNA, 21 bp, Artificial sequence
  SiRNA target sequence
tgaatcctccattggatagga

SEQ ID NO: 295610 - DNA, 21 bp, Artificial sequence
  SiRNA target sequence
gaatcctccattggataggaa

SEQ ID NO: 295611 - DNA, 21 bp, Artificial sequence
  SiRNA target sequence
aatcctccattggataggaac

SEQ ID NO: 295612 - DNA, 21 bp, Artificial sequence
  SiRNA target sequence
atcctccattggataggaaca

SEQ ID NO: 295613 - DNA, 21 bp, Artificial sequence
  SiRNA target sequence
tcctccattggataggaacag

SEQ ID NO: 295614 - DNA, 21 bp, Artificial sequence
  SiRNA target sequence
cctccattggataggaacagc

SEQ ID NO: 295615 - DNA, 21 bp, Artificial sequence
  SiRNA target sequence
ctccattggataggaacagct

SEQ ID NO: 295616 - DNA, 21 bp, Artificial sequence
  SiRNA target sequence
tccattggataggaacagcta

SEQ ID NO: 295617 - DNA, 21 bp, Artificial sequence
  SiRNA target sequence
ccattggataggaacagctat

SEQ ID NO: 295618 - DNA, 21 bp, Artificial sequence
  SiRNA target sequence
cattggataggaacagctata

SEQ ID NO: 295619 - DNA, 21 bp, Artificial sequence
  SiRNA target sequence
attggataggaacagctatat

SEQ ID NO: 295620 - DNA, 21 bp, Artificial sequence
  SiRNA target sequence
ttggataggaacagctatatt

SEQ ID NO: 295621 - DNA, 21 bp, Artificial sequence
  SiRNA target sequence
tggataggaacagctatattg

SEQ ID NO: 295622 - DNA, 21 bp, Artificial sequence
  SiRNA target sequence
ggataggaacagctatattgg

SEQ ID NO: 295623 - DNA, 21 bp, Artificial sequence
  SiRNA target sequence
gataggaacagctatattggg

SEQ ID NO: 295624 - DNA, 21 bp, Artificial sequence
  SiRNA target sequence
ataggaacagctatattgggt

SEQ ID NO: 295625 - DNA, 21 bp, Artificial sequence
  SiRNA target sequence
taggaacagctatattgggta

SEQ ID NO: 295626 - DNA, 21 bp, Artificial sequence
  SiRNA target sequence
aggaacagctatattgggtag

SEQ ID NO: 295627 - DNA, 21 bp, Artificial sequence
  SiRNA target sequence
ggaacagctatattgggtagt

SEQ ID NO: 295628 - DNA, 21 bp, Artificial sequence
  SiRNA target sequence
gaacagctatattgggtagtt

SEQ ID NO: 295629 - DNA, 21 bp, Artificial sequence
  SiRNA target sequence
aacagctatattgggtagttg

SEQ ID NO: 295630 - DNA, 21 bp, Artificial sequence
  SiRNA target sequence
acagctatattgggtagttgt

SEQ ID NO: 295631 - DNA, 21 bp, Artificial sequence
  SiRNA target sequence
cagctatattgggtagttgta

SEQ ID NO: 295632 - DNA, 21 bp, Artificial sequence
  SiRNA target sequence
agctatattgggtagttgtag

SEQ ID NO: 295633 - DNA, 21 bp, Artificial sequence
  SiRNA target sequence
gctatattgggtagttgtagc

SEQ ID NO: 295634 - DNA, 21 bp, Artificial sequence
  SiRNA target sequence
ctatattgggtagttgtagca

SEQ ID NO: 295635 - DNA, 21 bp, Artificial sequence
  SiRNA target sequence
tatattgggtagttgtagcag

SEQ ID NO: 295636 - DNA, 21 bp, Artificial sequence
  SiRNA target sequence
atattgggtagttgtagcagt

SEQ ID NO: 295637 - DNA, 21 bp, Artificial sequence
  SiRNA target sequence
tattgggtagttgtagcagtt

SEQ ID NO: 295638 - DNA, 21 bp, Artificial sequence
  SiRNA target sequence
attgggtagttgtagcagttg

SEQ ID NO: 295639 - DNA, 21 bp, Artificial sequence
  SiRNA target sequence
ttgggtagttgtagcagttgt

SEQ ID NO: 295640 - DNA, 21 bp, Artificial sequence
  SiRNA target sequence
tgggtagttgtagcagttgta

SEQ ID NO: 295641 - DNA, 21 bp, Artificial sequence
  SiRNA target sequence
gggtagttgtagcagttgtat

SEQ ID NO: 295642 - DNA, 21 bp, Artificial sequence
  SiRNA target sequence
ggtagttgtagcagttgtatt

SEQ ID NO: 295643 - DNA, 21 bp, Artificial sequence
  SiRNA target sequence
gtagttgtagcagttgtattc

SEQ ID NO: 295644 - DNA, 21 bp, Artificial sequence
  SiRNA target sequence
tagttgtagcagttgtattca

SEQ ID NO: 295645 - DNA, 21 bp, Artificial sequence
  SiRNA target sequence
agttgtagcagttgtattcaa

SEQ ID NO: 295646 - DNA, 21 bp, Artificial sequence
  SiRNA target sequence
gttgtagcagttgtattcaaa

SEQ ID NO: 295647 - DNA, 21 bp, Artificial sequence
  SiRNA target sequence
ttgtagcagttgtattcaaat

SEQ ID NO: 295648 - DNA, 21 bp, Artificial sequence
  SiRNA target sequence
tgtagcagttgtattcaaatg

SEQ ID NO: 295649 - DNA, 21 bp, Artificial sequence
  SiRNA target sequence
gtagcagttgtattcaaatga

SEQ ID NO: 295650 - DNA, 21 bp, Artificial sequence
  SiRNA target sequence
tagcagttgtattcaaatgaa

SEQ ID NO: 295651 - DNA, 21 bp, Artificial sequence
  SiRNA target sequence
agcagttgtattcaaatgaat

SEQ ID NO: 295652 - DNA, 21 bp, Artificial sequence
  SiRNA target sequence
gcagttgtattcaaatgaatg

SEQ ID NO: 295653 - DNA, 21 bp, Artificial sequence
  SiRNA target sequence
cagttgtattcaaatgaatgc

SEQ ID NO: 295654 - DNA, 21 bp, Artificial sequence
  SiRNA target sequence
agttgtattcaaatgaatgca

SEQ ID NO: 295655 - DNA, 21 bp, Artificial sequence
  SiRNA target sequence
gttgtattcaaatgaatgcag

SEQ ID NO: 295656 - DNA, 21 bp, Artificial sequence
  SiRNA target sequence
ttgtattcaaatgaatgcagc

SEQ ID NO: 295657 - DNA, 21 bp, Artificial sequence
  SiRNA target sequence
tgtattcaaatgaatgcagcg

SEQ ID NO: 295658 - DNA, 21 bp, Artificial sequence
  SiRNA target sequence
gtattcaaatgaatgcagcgt

SEQ ID NO: 295659 - DNA, 21 bp, Artificial sequence
  SiRNA target sequence
tattcaaatgaatgcagcgtt

SEQ ID NO: 295660 - DNA, 21 bp, Artificial sequence
  SiRNA target sequence
attcaaatgaatgcagcgttc

SEQ ID NO: 295661 - DNA, 21 bp, Artificial sequence
  SiRNA target sequence
ttcaaatgaatgcagcgttcc

SEQ ID NO: 295662 - DNA, 21 bp, Artificial sequence
  SiRNA target sequence
tcaaatgaatgcagcgttccg

SEQ ID NO: 295663 - DNA, 21 bp, Artificial sequence
  SiRNA target sequence
caaatgaatgcagcgttccga

SEQ ID NO: 295664 - DNA, 21 bp, Artificial sequence
  SiRNA target sequence
aaatgaatgcagcgttccgaa

SEQ ID NO: 295665 - DNA, 21 bp, Artificial sequence
  SiRNA target sequence
aatgaatgcagcgttccgaaa

SEQ ID NO: 295666 - DNA, 21 bp, Artificial sequence
  SiRNA target sequence
atgaatgcagcgttccgaaat

SEQ ID NO: 295667 - DNA, 21 bp, Artificial sequence
  SiRNA target sequence
tgaatgcagcgttccgaaata

SEQ ID NO: 295668 - DNA, 21 bp, Artificial sequence
  SiRNA target sequence
gaatgcagcgttccgaaatat

SEQ ID NO: 295669 - DNA, 21 bp, Artificial sequence
  SiRNA target sequence
aatgcagcgttccgaaatatc

SEQ ID NO: 295670 - DNA, 21 bp, Artificial sequence
  SiRNA target sequence
atgcagcgttccgaaatatca

SEQ ID NO: 295671 - DNA, 21 bp, Artificial sequence
  SiRNA target sequence
tgcagcgttccgaaatatcat

SEQ ID NO: 295672 - DNA, 21 bp, Artificial sequence
  SiRNA target sequence
gcagcgttccgaaatatcata

SEQ ID NO: 295673 - DNA, 21 bp, Artificial sequence
  SiRNA target sequence
cagcgttccgaaatatcatac

SEQ ID NO: 295674 - DNA, 21 bp, Artificial sequence
  SiRNA target sequence
agcgttccgaaatatcatacc

SEQ ID NO: 295675 - DNA, 21 bp, Artificial sequence
  SiRNA target sequence
gcgttccgaaatatcatacct

SEQ ID NO: 295676 - DNA, 21 bp, Artificial sequence
  SiRNA target sequence
cgttccgaaatatcatacctg

SEQ ID NO: 295677 - DNA, 21 bp, Artificial sequence
  SiRNA target sequence
gttccgaaatatcatacctgc

SEQ ID NO: 295678 - DNA, 21 bp, Artificial sequence
  SiRNA target sequence
ttccgaaatatcatacctgcc

SEQ ID NO: 295679 - DNA, 21 bp, Artificial sequence
  SiRNA target sequence
tccgaaatatcatacctgccg

SEQ ID NO: 295680 - DNA, 21 bp, Artificial sequence
  SiRNA target sequence
ccgaaatatcatacctgccga

SEQ ID NO: 295681 - DNA, 21 bp, Artificial sequence
  SiRNA target sequence
cgaaatatcatacctgccgat

SEQ ID NO: 295682 - DNA, 21 bp, Artificial sequence
  SiRNA target sequence
gaaatatcatacctgccgatc

SEQ ID NO: 295683 - DNA, 21 bp, Artificial sequence
  SiRNA target sequence
aaatatcatacctgccgatca

SEQ ID NO: 295684 - DNA, 21 bp, Artificial sequence
  SiRNA target sequence
aatatcatacctgccgatcaa

SEQ ID NO: 295685 - DNA, 21 bp, Artificial sequence
  SiRNA target sequence
atatcatacctgccgatcaag

SEQ ID NO: 295686 - DNA, 21 bp, Artificial sequence
  SiRNA target sequence
tatcatacctgccgatcaaga

SEQ ID NO: 295687 - DNA, 21 bp, Artificial sequence
  SiRNA target sequence
atcatacctgccgatcaagaa

SEQ ID NO: 295688 - DNA, 21 bp, Artificial sequence
  SiRNA target sequence
tcatacctgccgatcaagaaa

SEQ ID NO: 295689 - DNA, 21 bp, Artificial sequence
  SiRNA target sequence
catacctgccgatcaagaaac

SEQ ID NO: 295690 - DNA, 21 bp, Artificial sequence
  SiRNA target sequence
atacctgccgatcaagaaaca

SEQ ID NO: 295691 - DNA, 21 bp, Artificial sequence
  SiRNA target sequence
tacctgccgatcaagaaacaa

SEQ ID NO: 295692 - DNA, 21 bp, Artificial sequence
  SiRNA target sequence
acctgccgatcaagaaacaaa

SEQ ID NO: 295693 - DNA, 21 bp, Artificial sequence
  SiRNA target sequence
cctgccgatcaagaaacaaat

SEQ ID NO: 295694 - DNA, 21 bp, Artificial sequence
  SiRNA target sequence
ctgccgatcaagaaacaaata

SEQ ID NO: 295695 - DNA, 21 bp, Artificial sequence
  SiRNA target sequence
tgccgatcaagaaacaaatac

SEQ ID NO: 295696 - DNA, 21 bp, Artificial sequence
  SiRNA target sequence
gccgatcaagaaacaaatact

SEQ ID NO: 295697 - DNA, 21 bp, Artificial sequence
  SiRNA target sequence
ccgatcaagaaacaaatactt

SEQ ID NO: 295698 - DNA, 21 bp, Artificial sequence
  SiRNA target sequence
cgatcaagaaacaaatacttc

SEQ ID NO: 295699 - DNA, 21 bp, Artificial sequence
  SiRNA target sequence
gatcaagaaacaaatacttcc

SEQ ID NO: 295700 - DNA, 21 bp, Artificial sequence
  SiRNA target sequence
atcaagaaacaaatacttcca

SEQ ID NO: 295701 - DNA, 21 bp, Artificial sequence
  SiRNA target sequence
tcaagaaacaaatacttccaa

SEQ ID NO: 295702 - DNA, 21 bp, Artificial sequence
  SiRNA target sequence
caagaaacaaatacttccaac

SEQ ID NO: 295703 - DNA, 21 bp, Artificial sequence
  SiRNA target sequence
aagaaacaaatacttccaacg

SEQ ID NO: 295704 - DNA, 21 bp, Artificial sequence
  SiRNA target sequence
agaaacaaatacttccaacgt

SEQ ID NO: 295705 - DNA, 21 bp, Artificial sequence
  SiRNA target sequence
gaaacaaatacttccaacgta

SEQ ID NO: 295706 - DNA, 21 bp, Artificial sequence
  SiRNA target sequence
aaacaaatacttccaacgtac

SEQ ID NO: 295707 - DNA, 21 bp, Artificial sequence
  SiRNA target sequence
aacaaatacttccaacgtaca

SEQ ID NO: 295708 - DNA, 21 bp, Artificial sequence
  SiRNA target sequence
acaaatacttccaacgtacat

SEQ ID NO: 295709 - DNA, 21 bp, Artificial sequence
  SiRNA target sequence
caaatacttccaacgtacata

SEQ ID NO: 295710 - DNA, 21 bp, Artificial sequence
  SiRNA target sequence
aaatacttccaacgtacataa

SEQ ID NO: 295711 - DNA, 21 bp, Artificial sequence
  SiRNA target sequence
aatacttccaacgtacataat

SEQ ID NO: 295712 - DNA, 21 bp, Artificial sequence
  SiRNA target sequence
atacttccaacgtacataata

SEQ ID NO: 295713 - DNA, 21 bp, Artificial sequence
  SiRNA target sequence
tacttccaacgtacataatac

SEQ ID NO: 295714 - DNA, 21 bp, Artificial sequence
  SiRNA target sequence
acttccaacgtacataatacg

SEQ ID NO: 295715 - DNA, 21 bp, Artificial sequence
  SiRNA target sequence
cttccaacgtacataatacgc

SEQ ID NO: 295716 - DNA, 21 bp, Artificial sequence
  SiRNA target sequence
ttccaacgtacataatacgca

SEQ ID NO: 295717 - DNA, 21 bp, Artificial sequence
  SiRNA target sequence
tccaacgtacataatacgcaa

SEQ ID NO: 295718 - DNA, 21 bp, Artificial sequence
  SiRNA target sequence
ccaacgtacataatacgcaac

SEQ ID NO: 295719 - DNA, 21 bp, Artificial sequence
  SiRNA target sequence
caacgtacataatacgcaact

SEQ ID NO: 295720 - DNA, 21 bp, Artificial sequence
  SiRNA target sequence
aacgtacataatacgcaactc

SEQ ID NO: 295721 - DNA, 21 bp, Artificial sequence
  SiRNA target sequence
acgtacataatacgcaactcg

SEQ ID NO: 295722 - DNA, 21 bp, Artificial sequence
  SiRNA target sequence
cgtacataatacgcaactcgc

SEQ ID NO: 295723 - DNA, 21 bp, Artificial sequence
  SiRNA target sequence
gtacataatacgcaactcgcg

SEQ ID NO: 295724 - DNA, 21 bp, Artificial sequence
  SiRNA target sequence
tacataatacgcaactcgcgt

SEQ ID NO: 295725 - DNA, 21 bp, Artificial sequence
  SiRNA target sequence
acataatacgcaactcgcgtc

SEQ ID NO: 295726 - DNA, 21 bp, Artificial sequence
  SiRNA target sequence
cataatacgcaactcgcgtcg

SEQ ID NO: 295727 - DNA, 21 bp, Artificial sequence
  SiRNA target sequence
ataatacgcaactcgcgtcga

SEQ ID NO: 295728 - DNA, 21 bp, Artificial sequence
  SiRNA target sequence
taatacgcaactcgcgtcgac

SEQ ID NO: 295729 - DNA, 21 bp, Artificial sequence
  SiRNA target sequence
aatacgcaactcgcgtcgacc

SEQ ID NO: 295730 - DNA, 21 bp, Artificial sequence
  SiRNA target sequence
atacgcaactcgcgtcgacct

SEQ ID NO: 295731 - DNA, 21 bp, Artificial sequence
  SiRNA target sequence
tacgcaactcgcgtcgacctc

SEQ ID NO: 295732 - DNA, 21 bp, Artificial sequence
  SiRNA target sequence
acgcaactcgcgtcgacctct

SEQ ID NO: 295733 - DNA, 21 bp, Artificial sequence
  SiRNA target sequence
cgcaactcgcgtcgacctctg

SEQ ID NO: 295734 - DNA, 21 bp, Artificial sequence
  SiRNA target sequence
gcaactcgcgtcgacctctga

SEQ ID NO: 295735 - DNA, 21 bp, Artificial sequence
  SiRNA target sequence
caactcgcgtcgacctctgaa

SEQ ID NO: 295736 - DNA, 21 bp, Artificial sequence
  SiRNA target sequence
aactcgcgtcgacctctgaag

SEQ ID NO: 295737 - DNA, 21 bp, Artificial sequence
  SiRNA target sequence
actcgcgtcgacctctgaaga

SEQ ID NO: 295738 - DNA, 21 bp, Artificial sequence
  SiRNA target sequence
ctcgcgtcgacctctgaagaa

SEQ ID NO: 295739 - DNA, 21 bp, Artificial sequence
  SiRNA target sequence
tcgcgtcgacctctgaagaaa

SEQ ID NO: 295740 - DNA, 21 bp, Artificial sequence
  SiRNA target sequence
cgcgtcgacctctgaagaaaa

SEQ ID NO: 295741 - DNA, 21 bp, Artificial sequence
  SiRNA target sequence
gcgtcgacctctgaagaaaac

SEQ ID NO: 295742 - DNA, 21 bp, Artificial sequence
  SiRNA target sequence
cgtcgacctctgaagaaaact

SEQ ID NO: 295743 - DNA, 21 bp, Artificial sequence
  SiRNA target sequence
gtcgacctctgaagaaaactc

SEQ ID NO: 295744 - DNA, 21 bp, Artificial sequence
  SiRNA target sequence
tcgacctctgaagaaaactca

SEQ ID NO: 295745 - DNA, 21 bp, Artificial sequence
  SiRNA target sequence
cgacctctgaagaaaactcag

SEQ ID NO: 295746 - DNA, 21 bp, Artificial sequence
  SiRNA target sequence
gacctctgaagaaaactcagt

SEQ ID NO: 295747 - DNA, 21 bp, Artificial sequence
  SiRNA target sequence
acctctgaagaaaactcagtt

SEQ ID NO: 295748 - DNA, 21 bp, Artificial sequence
  SiRNA target sequence
cctctgaagaaaactcagttg

SEQ ID NO: 295749 - DNA, 21 bp, Artificial sequence
  SiRNA target sequence
ctctgaagaaaactcagttga

SEQ ID NO: 295750 - DNA, 21 bp, Artificial sequence
  SiRNA target sequence
tctgaagaaaactcagttgaa

SEQ ID NO: 295751 - DNA, 21 bp, Artificial sequence
  SiRNA target sequence
ctgaagaaaactcagttgaaa

SEQ ID NO: 295752 - DNA, 21 bp, Artificial sequence
  SiRNA target sequence
tgaagaaaactcagttgaaac

SEQ ID NO: 295753 - DNA, 21 bp, Artificial sequence
  SiRNA target sequence
gaagaaaactcagttgaaacg

SEQ ID NO: 295754 - DNA, 21 bp, Artificial sequence
  SiRNA target sequence
aagaaaactcagttgaaacgg

SEQ ID NO: 295755 - DNA, 21 bp, Artificial sequence
  SiRNA target sequence
agaaaactcagttgaaacgga

SEQ ID NO: 295756 - DNA, 21 bp, Artificial sequence
  SiRNA target sequence
gaaaactcagttgaaacggaa

SEQ ID NO: 295757 - DNA, 21 bp, Artificial sequence
  SiRNA target sequence
aaaactcagttgaaacggaac

SEQ ID NO: 295758 - DNA, 21 bp, Artificial sequence
  SiRNA target sequence
aaactcagttgaaacggaaca

SEQ ID NO: 295759 - DNA, 21 bp, Artificial sequence
  SiRNA target sequence
aactcagttgaaacggaacaa

SEQ ID NO: 295760 - DNA, 21 bp, Artificial sequence
  SiRNA target sequence
actcagttgaaacggaacaaa

SEQ ID NO: 295761 - DNA, 21 bp, Artificial sequence
  SiRNA target sequence
ctcagttgaaacggaacaaat

SEQ ID NO: 295762 - DNA, 21 bp, Artificial sequence
  SiRNA target sequence
tcagttgaaacggaacaaatc

SEQ ID NO: 295763 - DNA, 21 bp, Artificial sequence
  SiRNA target sequence
cagttgaaacggaacaaatca

SEQ ID NO: 295764 - DNA, 21 bp, Artificial sequence
  SiRNA target sequence
agttgaaacggaacaaatcac

SEQ ID NO: 295765 - DNA, 21 bp, Artificial sequence
  SiRNA target sequence
gttgaaacggaacaaatcacc

SEQ ID NO: 295766 - DNA, 21 bp, Artificial sequence
  SiRNA target sequence
ttgaaacggaacaaatcacca

SEQ ID NO: 295767 - DNA, 21 bp, Artificial sequence
  SiRNA target sequence
tgaaacggaacaaatcaccac

SEQ ID NO: 295768 - DNA, 21 bp, Artificial sequence
  SiRNA target sequence
gaaacggaacaaatcaccacc

SEQ ID NO: 295769 - DNA, 21 bp, Artificial sequence
  SiRNA target sequence
aaacggaacaaatcaccacct

SEQ ID NO: 295770 - DNA, 21 bp, Artificial sequence
  SiRNA target sequence
aacggaacaaatcaccacctt

SEQ ID NO: 295771 - DNA, 21 bp, Artificial sequence
  SiRNA target sequence
acggaacaaatcaccaccttt

SEQ ID NO: 295772 - DNA, 21 bp, Artificial sequence
  SiRNA target sequence
cggaacaaatcaccacctttc

SEQ ID NO: 295773 - DNA, 21 bp, Artificial sequence
  SiRNA target sequence
ggaacaaatcaccacctttca

SEQ ID NO: 295774 - DNA, 21 bp, Artificial sequence
  SiRNA target sequence
gaacaaatcaccacctttcat

SEQ ID NO: 295775 - DNA, 21 bp, Artificial sequence
  SiRNA target sequence
aacaaatcaccacctttcatg

SEQ ID NO: 295776 - DNA, 21 bp, Artificial sequence
  SiRNA target sequence
acaaatcaccacctttcatga

SEQ ID NO: 295777 - DNA, 21 bp, Artificial sequence
  SiRNA target sequence
caaatcaccacctttcatgat

SEQ ID NO: 295778 - DNA, 21 bp, Artificial sequence
  SiRNA target sequence
aaatcaccacctttcatgatg

SEQ ID NO: 295779 - DNA, 21 bp, Artificial sequence
  SiRNA target sequence
aatcaccacctttcatgatgt

SEQ ID NO: 295780 - DNA, 21 bp, Artificial sequence
  SiRNA target sequence
atcaccacctttcatgatgtg

SEQ ID NO: 295781 - DNA, 21 bp, Artificial sequence
  SiRNA target sequence
tcaccacctttcatgatgtgg

SEQ ID NO: 295782 - DNA, 21 bp, Artificial sequence
  SiRNA target sequence
caccacctttcatgatgtgga

SEQ ID NO: 295783 - DNA, 21 bp, Artificial sequence
  SiRNA target sequence
accacctttcatgatgtggaa

SEQ ID NO: 295784 - DNA, 21 bp, Artificial sequence
  SiRNA target sequence
ccacctttcatgatgtggaaa

SEQ ID NO: 295785 - DNA, 21 bp, Artificial sequence
  SiRNA target sequence
cacctttcatgatgtggaaac

SEQ ID NO: 295786 - DNA, 21 bp, Artificial sequence
  SiRNA target sequence
acctttcatgatgtggaaact

SEQ ID NO: 295787 - DNA, 21 bp, Artificial sequence
  SiRNA target sequence
cctttcatgatgtggaaactc

SEQ ID NO: 295788 - DNA, 21 bp, Artificial sequence
  SiRNA target sequence
ctttcatgatgtggaaactcc

SEQ ID NO: 295789 - DNA, 21 bp, Artificial sequence
  SiRNA target sequence
tttcatgatgtggaaactcca

SEQ ID NO: 295790 - DNA, 21 bp, Artificial sequence
  SiRNA target sequence
ttcatgatgtggaaactccaa

SEQ ID NO: 295791 - DNA, 21 bp, Artificial sequence
  SiRNA target sequence
tcatgatgtggaaactccaaa

SEQ ID NO: 295792 - DNA, 21 bp, Artificial sequence
  SiRNA target sequence
catgatgtggaaactccaaat

SEQ ID NO: 295793 - DNA, 21 bp, Artificial sequence
  SiRNA target sequence
atgatgtggaaactccaaata

SEQ ID NO: 295794 - DNA, 21 bp, Artificial sequence
  SiRNA target sequence
tgatgtggaaactccaaatag

SEQ ID NO: 295795 - DNA, 21 bp, Artificial sequence
  SiRNA target sequence
gatgtggaaactccaaatagg

SEQ ID NO: 295796 - DNA, 21 bp, Artificial sequence
  SiRNA target sequence
atgtggaaactccaaatagga

SEQ ID NO: 295797 - DNA, 21 bp, Artificial sequence
  SiRNA target sequence
tgtggaaactccaaataggat

SEQ ID NO: 295798 - DNA, 21 bp, Artificial sequence
  SiRNA target sequence
gtggaaactccaaataggatc

SEQ ID NO: 295799 - DNA, 21 bp, Artificial sequence
  SiRNA target sequence
tggaaactccaaataggatca

SEQ ID NO: 295800 - DNA, 21 bp, Artificial sequence
  SiRNA target sequence
ggaaactccaaataggatcaa

SEQ ID NO: 295801 - DNA, 21 bp, Artificial sequence
  SiRNA target sequence
gaaactccaaataggatcaat

SEQ ID NO: 295802 - DNA, 21 bp, Artificial sequence
  SiRNA target sequence
aaactccaaataggatcaata

SEQ ID NO: 295803 - DNA, 21 bp, Artificial sequence
  SiRNA target sequence
aactccaaataggatcaatac

SEQ ID NO: 295804 - DNA, 21 bp, Artificial sequence
  SiRNA target sequence
actccaaataggatcaatacc

SEQ ID NO: 295805 - DNA, 21 bp, Artificial sequence
  SiRNA target sequence
ctccaaataggatcaataccc

SEQ ID NO: 295806 - DNA, 21 bp, Artificial sequence
  SiRNA target sequence
tccaaataggatcaatacccc

SEQ ID NO: 295807 - DNA, 21 bp, Artificial sequence
  SiRNA target sequence
ccaaataggatcaataccccc

SEQ ID NO: 295808 - DNA, 21 bp, Artificial sequence
  SiRNA target sequence
caaataggatcaataccccca

SEQ ID NO: 295809 - DNA, 21 bp, Artificial sequence
  SiRNA target sequence
aaataggatcaatacccccat

SEQ ID NO: 295810 - DNA, 21 bp, Artificial sequence
  SiRNA target sequence
aataggatcaatacccccatg

SEQ ID NO: 295811 - DNA, 21 bp, Artificial sequence
  SiRNA target sequence
ataggatcaatacccccatgg

SEQ ID NO: 295812 - DNA, 21 bp, Artificial sequence
  SiRNA target sequence
taggatcaatacccccatggc

SEQ ID NO: 295813 - DNA, 21 bp, Artificial sequence
  SiRNA target sequence
aggatcaatacccccatggct

SEQ ID NO: 295814 - DNA, 21 bp, Artificial sequence
  SiRNA target sequence
ggatcaatacccccatggctc

SEQ ID NO: 295815 - DNA, 21 bp, Artificial sequence
  SiRNA target sequence
gatcaatacccccatggctca

SEQ ID NO: 295816 - DNA, 21 bp, Artificial sequence
  SiRNA target sequence
atcaatacccccatggctcaa

SEQ ID NO: 295817 - DNA, 21 bp, Artificial sequence
  SiRNA target sequence
tcaatacccccatggctcaag

SEQ ID NO: 295818 - DNA, 21 bp, Artificial sequence
  SiRNA target sequence
caatacccccatggctcaaga

SEQ ID NO: 295819 - DNA, 21 bp, Artificial sequence
  SiRNA target sequence
aatacccccatggctcaagac

SEQ ID NO: 295820 - DNA, 21 bp, Artificial sequence
  SiRNA target sequence
atacccccatggctcaagaca

SEQ ID NO: 295821 - DNA, 21 bp, Artificial sequence
  SiRNA target sequence
tacccccatggctcaagacac

SEQ ID NO: 295822 - DNA, 21 bp, Artificial sequence
  SiRNA target sequence
acccccatggctcaagacact

SEQ ID NO: 295823 - DNA, 21 bp, Artificial sequence
  SiRNA target sequence
cccccatggctcaagacactt

SEQ ID NO: 295824 - DNA, 21 bp, Artificial sequence
  SiRNA target sequence
ccccatggctcaagacacttc

SEQ ID NO: 295825 - DNA, 21 bp, Artificial sequence
  SiRNA target sequence
cccatggctcaagacacttca

SEQ ID NO: 295826 - DNA, 21 bp, Artificial sequence
  SiRNA target sequence
ccatggctcaagacacttcat

SEQ ID NO: 295827 - DNA, 21 bp, Artificial sequence
  SiRNA target sequence
catggctcaagacacttcatc

SEQ ID NO: 295828 - DNA, 21 bp, Artificial sequence
  SiRNA target sequence
atggctcaagacacttcatcg

SEQ ID NO: 295829 - DNA, 21 bp, Artificial sequence
  SiRNA target sequence
tggctcaagacacttcatcgg

SEQ ID NO: 295830 - DNA, 21 bp, Artificial sequence
  SiRNA target sequence
ggctcaagacacttcatcggc

SEQ ID NO: 295831 - DNA, 21 bp, Artificial sequence
  SiRNA target sequence
gctcaagacacttcatcggct

SEQ ID NO: 295832 - DNA, 21 bp, Artificial sequence
  SiRNA target sequence
ctcaagacacttcatcggctc

SEQ ID NO: 295833 - DNA, 21 bp, Artificial sequence
  SiRNA target sequence
tcaagacacttcatcggctcg

SEQ ID NO: 295834 - DNA, 21 bp, Artificial sequence
  SiRNA target sequence
caagacacttcatcggctcgg

SEQ ID NO: 295835 - DNA, 21 bp, Artificial sequence
  SiRNA target sequence
aagacacttcatcggctcgga

SEQ ID NO: 295836 - DNA, 21 bp, Artificial sequence
  SiRNA target sequence
agacacttcatcggctcggag

SEQ ID NO: 295837 - DNA, 21 bp, Artificial sequence
  SiRNA target sequence
gacacttcatcggctcggagc

SEQ ID NO: 295838 - DNA, 21 bp, Artificial sequence
  SiRNA target sequence
acacttcatcggctcggagca

SEQ ID NO: 295839 - DNA, 21 bp, Artificial sequence
  SiRNA target sequence
cacttcatcggctcggagcat

SEQ ID NO: 295840 - DNA, 21 bp, Artificial sequence
  SiRNA target sequence
acttcatcggctcggagcatg

SEQ ID NO: 295841 - DNA, 21 bp, Artificial sequence
  SiRNA target sequence
cttcatcggctcggagcatgg

SEQ ID NO: 295842 - DNA, 21 bp, Artificial sequence
  SiRNA target sequence
ttcatcggctcggagcatgga

SEQ ID NO: 295843 - DNA, 21 bp, Artificial sequence
  SiRNA target sequence
tcatcggctcggagcatggat

SEQ ID NO: 295844 - DNA, 21 bp, Artificial sequence
  SiRNA target sequence
catcggctcggagcatggatg

SEQ ID NO: 295845 - DNA, 21 bp, Artificial sequence
  SiRNA target sequence
atcggctcggagcatggatga

SEQ ID NO: 295846 - DNA, 21 bp, Artificial sequence
  SiRNA target sequence
tcggctcggagcatggatgat

SEQ ID NO: 295847 - DNA, 21 bp, Artificial sequence
  SiRNA target sequence
cggctcggagcatggatgata

SEQ ID NO: 295848 - DNA, 21 bp, Artificial sequence
  SiRNA target sequence
ggctcggagcatggatgatac

SEQ ID NO: 295849 - DNA, 21 bp, Artificial sequence
  SiRNA target sequence
gctcggagcatggatgatacg

SEQ ID NO: 295850 - DNA, 21 bp, Artificial sequence
  SiRNA target sequence
ctcggagcatggatgatacgc

SEQ ID NO: 295851 - DNA, 21 bp, Artificial sequence
  SiRNA target sequence
tcggagcatggatgatacgca

SEQ ID NO: 295852 - DNA, 21 bp, Artificial sequence
  SiRNA target sequence
cggagcatggatgatacgcac

SEQ ID NO: 295853 - DNA, 21 bp, Artificial sequence
  SiRNA target sequence
ggagcatggatgatacgcaca

SEQ ID NO: 295854 - DNA, 21 bp, Artificial sequence
  SiRNA target sequence
gagcatggatgatacgcacag

SEQ ID NO: 295855 - DNA, 21 bp, Artificial sequence
  SiRNA target sequence
agcatggatgatacgcacagt

SEQ ID NO: 295856 - DNA, 21 bp, Artificial sequence
  SiRNA target sequence
gcatggatgatacgcacagta

SEQ ID NO: 295857 - DNA, 21 bp, Artificial sequence
  SiRNA target sequence
catggatgatacgcacagtat

SEQ ID NO: 295858 - DNA, 21 bp, Artificial sequence
  SiRNA target sequence
atggatgatacgcacagtatt

SEQ ID NO: 295859 - DNA, 21 bp, Artificial sequence
  SiRNA target sequence
tggatgatacgcacagtatta

SEQ ID NO: 295860 - DNA, 21 bp, Artificial sequence
  SiRNA target sequence
ggatgatacgcacagtattat

SEQ ID NO: 295861 - DNA, 21 bp, Artificial sequence
  SiRNA target sequence
gatgatacgcacagtattatt

SEQ ID NO: 295862 - DNA, 21 bp, Artificial sequence
  SiRNA target sequence
atgatacgcacagtattattc

SEQ ID NO: 295863 - DNA, 21 bp, Artificial sequence
  SiRNA target sequence
tgatacgcacagtattattca

SEQ ID NO: 295864 - DNA, 21 bp, Artificial sequence
  SiRNA target sequence
gatacgcacagtattattcag

SEQ ID NO: 295865 - DNA, 21 bp, Artificial sequence
  SiRNA target sequence
atacgcacagtattattcagt

SEQ ID NO: 295866 - DNA, 21 bp, Artificial sequence
  SiRNA target sequence
tacgcacagtattattcagtt

SEQ ID NO: 295867 - DNA, 21 bp, Artificial sequence
  SiRNA target sequence
acgcacagtattattcagttt

SEQ ID NO: 295868 - DNA, 21 bp, Artificial sequence
  SiRNA target sequence
cgcacagtattattcagtttt

SEQ ID NO: 295869 - DNA, 21 bp, Artificial sequence
  SiRNA target sequence
gcacagtattattcagttttt

SEQ ID NO: 295870 - DNA, 21 bp, Artificial sequence
  SiRNA target sequence
cacagtattattcagttttta

SEQ ID NO: 295871 - DNA, 21 bp, Artificial sequence
  SiRNA target sequence
acagtattattcagtttttac

SEQ ID NO: 295872 - DNA, 21 bp, Artificial sequence
  SiRNA target sequence
cagtattattcagtttttaca

SEQ ID NO: 295873 - DNA, 21 bp, Artificial sequence
  SiRNA target sequence
agtattattcagtttttacaa

SEQ ID NO: 295874 - DNA, 21 bp, Artificial sequence
  SiRNA target sequence
gtattattcagtttttacaac

SEQ ID NO: 295875 - DNA, 21 bp, Artificial sequence
  SiRNA target sequence
tattattcagtttttacaacg

SEQ ID NO: 295876 - DNA, 21 bp, Artificial sequence
  SiRNA target sequence
attattcagtttttacaacgc

SEQ ID NO: 295877 - DNA, 21 bp, Artificial sequence
  SiRNA target sequence
ttattcagtttttacaacgcc

SEQ ID NO: 295878 - DNA, 21 bp, Artificial sequence
  SiRNA target sequence
tattcagtttttacaacgccc

SEQ ID NO: 295879 - DNA, 21 bp, Artificial sequence
  SiRNA target sequence
attcagtttttacaacgcccc

SEQ ID NO: 295880 - DNA, 21 bp, Artificial sequence
  SiRNA target sequence
ttcagtttttacaacgccccg

SEQ ID NO: 295881 - DNA, 21 bp, Artificial sequence
  SiRNA target sequence
tcagtttttacaacgccccgt

SEQ ID NO: 295882 - DNA, 21 bp, Artificial sequence
  SiRNA target sequence
cagtttttacaacgccccgta

SEQ ID NO: 295883 - DNA, 21 bp, Artificial sequence
  SiRNA target sequence
agtttttacaacgccccgtac

SEQ ID NO: 295884 - DNA, 21 bp, Artificial sequence
  SiRNA target sequence
gtttttacaacgccccgtact

SEQ ID NO: 295885 - DNA, 21 bp, Artificial sequence
  SiRNA target sequence
tttttacaacgccccgtactc

SEQ ID NO: 295886 - DNA, 21 bp, Artificial sequence
  SiRNA target sequence
ttttacaacgccccgtactca

SEQ ID NO: 295887 - DNA, 21 bp, Artificial sequence
  SiRNA target sequence
tttacaacgccccgtactcat

SEQ ID NO: 295888 - DNA, 21 bp, Artificial sequence
  SiRNA target sequence
ttacaacgccccgtactcatt

SEQ ID NO: 295889 - DNA, 21 bp, Artificial sequence
  SiRNA target sequence
tacaacgccccgtactcattg

SEQ ID NO: 295890 - DNA, 21 bp, Artificial sequence
  SiRNA target sequence
acaacgccccgtactcattga

SEQ ID NO: 295891 - DNA, 21 bp, Artificial sequence
  SiRNA target sequence
caacgccccgtactcattgac

SEQ ID NO: 295892 - DNA, 21 bp, Artificial sequence
  SiRNA target sequence
aacgccccgtactcattgacc

SEQ ID NO: 295893 - DNA, 21 bp, Artificial sequence
  SiRNA target sequence
acgccccgtactcattgacca

SEQ ID NO: 295894 - DNA, 21 bp, Artificial sequence
  SiRNA target sequence
cgccccgtactcattgaccac

SEQ ID NO: 295895 - DNA, 21 bp, Artificial sequence
  SiRNA target sequence
gccccgtactcattgaccaca

SEQ ID NO: 295896 - DNA, 21 bp, Artificial sequence
  SiRNA target sequence
ccccgtactcattgaccacat

SEQ ID NO: 295897 - DNA, 21 bp, Artificial sequence
  SiRNA target sequence
cccgtactcattgaccacatt

SEQ ID NO: 295898 - DNA, 21 bp, Artificial sequence
  SiRNA target sequence
ccgtactcattgaccacattg

SEQ ID NO: 295899 - DNA, 21 bp, Artificial sequence
  SiRNA target sequence
cgtactcattgaccacattga

SEQ ID NO: 295900 - DNA, 21 bp, Artificial sequence
  SiRNA target sequence
gtactcattgaccacattgag

SEQ ID NO: 295901 - DNA, 21 bp, Artificial sequence
  SiRNA target sequence
tactcattgaccacattgagg

SEQ ID NO: 295902 - DNA, 21 bp, Artificial sequence
  SiRNA target sequence
actcattgaccacattgaggt

SEQ ID NO: 295903 - DNA, 21 bp, Artificial sequence
  SiRNA target sequence
ctcattgaccacattgaggtc

SEQ ID NO: 295904 - DNA, 21 bp, Artificial sequence
  SiRNA target sequence
tcattgaccacattgaggtca

SEQ ID NO: 295905 - DNA, 21 bp, Artificial sequence
  SiRNA target sequence
cattgaccacattgaggtcat

SEQ ID NO: 295906 - DNA, 21 bp, Artificial sequence
  SiRNA target sequence
attgaccacattgaggtcatt

SEQ ID NO: 295907 - DNA, 21 bp, Artificial sequence
  SiRNA target sequence
ttgaccacattgaggtcattg

SEQ ID NO: 295908 - DNA, 21 bp, Artificial sequence
  SiRNA target sequence
tgaccacattgaggtcattgc

SEQ ID NO: 295909 - DNA, 21 bp, Artificial sequence
  SiRNA target sequence
gaccacattgaggtcattgct

SEQ ID NO: 295910 - DNA, 21 bp, Artificial sequence
  SiRNA target sequence
accacattgaggtcattgctg

SEQ ID NO: 295911 - DNA, 21 bp, Artificial sequence
  SiRNA target sequence
ccacattgaggtcattgctgg

SEQ ID NO: 295912 - DNA, 21 bp, Artificial sequence
  SiRNA target sequence
cacattgaggtcattgctgga

SEQ ID NO: 295913 - DNA, 21 bp, Artificial sequence
  SiRNA target sequence
acattgaggtcattgctggat

SEQ ID NO: 295914 - DNA, 21 bp, Artificial sequence
  SiRNA target sequence
cattgaggtcattgctggatc

SEQ ID NO: 295915 - DNA, 21 bp, Artificial sequence
  SiRNA target sequence
attgaggtcattgctggatca

SEQ ID NO: 295916 - DNA, 21 bp, Artificial sequence
  SiRNA target sequence
ttgaggtcattgctggatcaa

SEQ ID NO: 295917 - DNA, 21 bp, Artificial sequence
  SiRNA target sequence
tgaggtcattgctggatcaac

SEQ ID NO: 295918 - DNA, 21 bp, Artificial sequence
  SiRNA target sequence
gaggtcattgctggatcaaca

SEQ ID NO: 295919 - DNA, 21 bp, Artificial sequence
  SiRNA target sequence
aggtcattgctggatcaacag

SEQ ID NO: 295920 - DNA, 21 bp, Artificial sequence
  SiRNA target sequence
ggtcattgctggatcaacagc

SEQ ID NO: 295921 - DNA, 21 bp, Artificial sequence
  SiRNA target sequence
gtcattgctggatcaacagca

SEQ ID NO: 295922 - DNA, 21 bp, Artificial sequence
  SiRNA target sequence
tcattgctggatcaacagcag

SEQ ID NO: 295923 - DNA, 21 bp, Artificial sequence
  SiRNA target sequence
cattgctggatcaacagcaga

SEQ ID NO: 295924 - DNA, 21 bp, Artificial sequence
  SiRNA target sequence
attgctggatcaacagcagat

SEQ ID NO: 295925 - DNA, 21 bp, Artificial sequence
  SiRNA target sequence
ttgctggatcaacagcagatg

SEQ ID NO: 295926 - DNA, 21 bp, Artificial sequence
  SiRNA target sequence
tgctggatcaacagcagatga

SEQ ID NO: 295927 - DNA, 21 bp, Artificial sequence
  SiRNA target sequence
gctggatcaacagcagatgat

SEQ ID NO: 295928 - DNA, 21 bp, Artificial sequence
  SiRNA target sequence
ctggatcaacagcagatgata

SEQ ID NO: 295929 - DNA, 21 bp, Artificial sequence
  SiRNA target sequence
tggatcaacagcagatgataa

SEQ ID NO: 295930 - DNA, 21 bp, Artificial sequence
  SiRNA target sequence
ggatcaacagcagatgataac

SEQ ID NO: 295931 - DNA, 21 bp, Artificial sequence
  SiRNA target sequence
gatcaacagcagatgataaca

SEQ ID NO: 295932 - DNA, 21 bp, Artificial sequence
  SiRNA target sequence
atcaacagcagatgataacaa

SEQ ID NO: 295933 - DNA, 21 bp, Artificial sequence
  SiRNA target sequence
tcaacagcagatgataacaaa

SEQ ID NO: 295934 - DNA, 21 bp, Artificial sequence
  SiRNA target sequence
caacagcagatgataacaaac

SEQ ID NO: 295935 - DNA, 21 bp, Artificial sequence
  SiRNA target sequence
aacagcagatgataacaaacc

SEQ ID NO: 295936 - DNA, 21 bp, Artificial sequence
  SiRNA target sequence
acagcagatgataacaaaccc

SEQ ID NO: 295937 - DNA, 21 bp, Artificial sequence
  SiRNA target sequence
cagcagatgataacaaacccc

SEQ ID NO: 295938 - DNA, 21 bp, Artificial sequence
  SiRNA target sequence
agcagatgataacaaacccct

SEQ ID NO: 295939 - DNA, 21 bp, Artificial sequence
  SiRNA target sequence
gcagatgataacaaacccctc

SEQ ID NO: 295940 - DNA, 21 bp, Artificial sequence
  SiRNA target sequence
cagatgataacaaacccctca

SEQ ID NO: 295941 - DNA, 21 bp, Artificial sequence
  SiRNA target sequence
agatgataacaaacccctcaa

SEQ ID NO: 295942 - DNA, 21 bp, Artificial sequence
  SiRNA target sequence
gatgataacaaacccctcaat

SEQ ID NO: 295943 - DNA, 21 bp, Artificial sequence
  SiRNA target sequence
atgataacaaacccctcaata

SEQ ID NO: 295944 - DNA, 21 bp, Artificial sequence
  SiRNA target sequence
tgataacaaacccctcaatag

SEQ ID NO: 295945 - DNA, 21 bp, Artificial sequence
  SiRNA target sequence
gataacaaacccctcaataga

SEQ ID NO: 295946 - DNA, 21 bp, Artificial sequence
  SiRNA target sequence
ataacaaacccctcaatagat

SEQ ID NO: 295947 - DNA, 21 bp, Artificial sequence
  SiRNA target sequence
taacaaacccctcaatagata

SEQ ID NO: 295948 - DNA, 21 bp, Artificial sequence
  SiRNA target sequence
aacaaacccctcaatagatat

SEQ ID NO: 295949 - DNA, 21 bp, Artificial sequence
  SiRNA target sequence
acaaacccctcaatagatatg

SEQ ID NO: 295950 - DNA, 21 bp, Artificial sequence
  SiRNA target sequence
caaacccctcaatagatatgt

SEQ ID NO: 295951 - DNA, 21 bp, Artificial sequence
  SiRNA target sequence
aaacccctcaatagatatgtg

SEQ ID NO: 295952 - DNA, 21 bp, Artificial sequence
  SiRNA target sequence
aacccctcaatagatatgtgt

SEQ ID NO: 295953 - DNA, 21 bp, Artificial sequence
  SiRNA target sequence
acccctcaatagatatgtgtt

SEQ ID NO: 295954 - DNA, 21 bp, Artificial sequence
  SiRNA target sequence
cccctcaatagatatgtgtta

SEQ ID NO: 295955 - DNA, 21 bp, Artificial sequence
  SiRNA target sequence
ccctcaatagatatgtgttaa

SEQ ID NO: 295956 - DNA, 21 bp, Artificial sequence
  SiRNA target sequence
cctcaatagatatgtgttaaa

SEQ ID NO: 295957 - DNA, 21 bp, Artificial sequence
  SiRNA target sequence
ctcaatagatatgtgttaaat

SEQ ID NO: 295958 - DNA, 21 bp, Artificial sequence
  SiRNA target sequence
tcaatagatatgtgttaaatc

SEQ ID NO: 295959 - DNA, 21 bp, Artificial sequence
  SiRNA target sequence
caatagatatgtgttaaatcg

SEQ ID NO: 295960 - DNA, 21 bp, Artificial sequence
  SiRNA target sequence
aatagatatgtgttaaatcga

SEQ ID NO: 295961 - DNA, 21 bp, Artificial sequence
  SiRNA target sequence
atagatatgtgttaaatcgac

SEQ ID NO: 295962 - DNA, 21 bp, Artificial sequence
  SiRNA target sequence
tagatatgtgttaaatcgaca

SEQ ID NO: 295963 - DNA, 21 bp, Artificial sequence
  SiRNA target sequence
agatatgtgttaaatcgacag

SEQ ID NO: 295964 - DNA, 21 bp, Artificial sequence
  SiRNA target sequence
gatatgtgttaaatcgacaga

SEQ ID NO: 295965 - DNA, 21 bp, Artificial sequence
  SiRNA target sequence
atatgtgttaaatcgacagaa

SEQ ID NO: 295966 - DNA, 21 bp, Artificial sequence
  SiRNA target sequence
tatgtgttaaatcgacagaat

SEQ ID NO: 295967 - DNA, 21 bp, Artificial sequence
  SiRNA target sequence
atgtgttaaatcgacagaatc

SEQ ID NO: 295968 - DNA, 21 bp, Artificial sequence
  SiRNA target sequence
tgtgttaaatcgacagaatcc

SEQ ID NO: 295969 - DNA, 21 bp, Artificial sequence
  SiRNA target sequence
gtgttaaatcgacagaatcca

SEQ ID NO: 295970 - DNA, 21 bp, Artificial sequence
  SiRNA target sequence
tgttaaatcgacagaatccac

SEQ ID NO: 295971 - DNA, 21 bp, Artificial sequence
  SiRNA target sequence
gttaaatcgacagaatccaca

SEQ ID NO: 295972 - DNA, 21 bp, Artificial sequence
  SiRNA target sequence
ttaaatcgacagaatccacaa

SEQ ID NO: 295973 - DNA, 21 bp, Artificial sequence
  SiRNA target sequence
taaatcgacagaatccacaac

SEQ ID NO: 295974 - DNA, 21 bp, Artificial sequence
  SiRNA target sequence
aaatcgacagaatccacaacc

SEQ ID NO: 295975 - DNA, 21 bp, Artificial sequence
  SiRNA target sequence
aatcgacagaatccacaacca

SEQ ID NO: 295976 - DNA, 21 bp, Artificial sequence
  SiRNA target sequence
atcgacagaatccacaaccat

SEQ ID NO: 295977 - DNA, 21 bp, Artificial sequence
  SiRNA target sequence
tcgacagaatccacaaccatt

SEQ ID NO: 295978 - DNA, 21 bp, Artificial sequence
  SiRNA target sequence
cgacagaatccacaaccattt

SEQ ID NO: 295979 - DNA, 21 bp, Artificial sequence
  SiRNA target sequence
gacagaatccacaaccatttg

SEQ ID NO: 295980 - DNA, 21 bp, Artificial sequence
  SiRNA target sequence
acagaatccacaaccatttgt

SEQ ID NO: 295981 - DNA, 21 bp, Artificial sequence
  SiRNA target sequence
cagaatccacaaccatttgtt

SEQ ID NO: 295982 - DNA, 21 bp, Artificial sequence
  SiRNA target sequence
agaatccacaaccatttgtta

SEQ ID NO: 295983 - DNA, 21 bp, Artificial sequence
  SiRNA target sequence
gaatccacaaccatttgttaa

SEQ ID NO: 295984 - DNA, 21 bp, Artificial sequence
  SiRNA target sequence
aatccacaaccatttgttaaa

SEQ ID NO: 295985 - DNA, 21 bp, Artificial sequence
  SiRNA target sequence
atccacaaccatttgttaaat

SEQ ID NO: 295986 - DNA, 21 bp, Artificial sequence
  SiRNA target sequence
tccacaaccatttgttaaatc

SEQ ID NO: 295987 - DNA, 21 bp, Artificial sequence
  SiRNA target sequence
ccacaaccatttgttaaatct

SEQ ID NO: 295988 - DNA, 21 bp, Artificial sequence
  SiRNA target sequence
cacaaccatttgttaaatctt

SEQ ID NO: 295989 - DNA, 21 bp, Artificial sequence
  SiRNA target sequence
acaaccatttgttaaatcttg

SEQ ID NO: 295990 - DNA, 21 bp, Artificial sequence
  SiRNA target sequence
caaccatttgttaaatcttgg

SEQ ID NO: 295991 - DNA, 21 bp, Artificial sequence
  SiRNA target sequence
aaccatttgttaaatcttgga

SEQ ID NO: 295992 - DNA, 21 bp, Artificial sequence
  SiRNA target sequence
accatttgttaaatcttggac

SEQ ID NO: 295993 - DNA, 21 bp, Artificial sequence
  SiRNA target sequence
ccatttgttaaatcttggaca

SEQ ID NO: 295994 - DNA, 21 bp, Artificial sequence
  SiRNA target sequence
catttgttaaatcttggacat

SEQ ID NO: 295995 - DNA, 21 bp, Artificial sequence
  SiRNA target sequence
atttgttaaatcttggacatt

SEQ ID NO: 295996 - DNA, 21 bp, Artificial sequence
  SiRNA target sequence
tttgttaaatcttggacattg

SEQ ID NO: 295997 - DNA, 21 bp, Artificial sequence
  SiRNA target sequence
ttgttaaatcttggacattgc

SEQ ID NO: 295998 - DNA, 21 bp, Artificial sequence
  SiRNA target sequence
tgttaaatcttggacattgcc

SEQ ID NO: 295999 - DNA, 21 bp, Artificial sequence
  SiRNA target sequence
gttaaatcttggacattgcct

SEQ ID NO: 296000 - DNA, 21 bp, Artificial sequence
  SiRNA target sequence
ttaaatcttggacattgcctt

SEQ ID NO: 296001 - DNA, 21 bp, Artificial sequence
  SiRNA target sequence
taaatcttggacattgccttc

SEQ ID NO: 296002 - DNA, 21 bp, Artificial sequence
  SiRNA target sequence
aaatcttggacattgccttca

SEQ ID NO: 296003 - DNA, 21 bp, Artificial sequence
  SiRNA target sequence
aatcttggacattgccttcag

SEQ ID NO: 296004 - DNA, 21 bp, Artificial sequence
  SiRNA target sequence
atcttggacattgccttcagt

SEQ ID NO: 296005 - DNA, 21 bp, Artificial sequence
  SiRNA target sequence
tcttggacattgccttcagta

SEQ ID NO: 296006 - DNA, 21 bp, Artificial sequence
  SiRNA target sequence
cttggacattgccttcagtag

SEQ ID NO: 296007 - DNA, 21 bp, Artificial sequence
  SiRNA target sequence
ttggacattgccttcagtagt

SEQ ID NO: 296008 - DNA, 21 bp, Artificial sequence
  SiRNA target sequence
tggacattgccttcagtagtt

SEQ ID NO: 296009 - DNA, 21 bp, Artificial sequence
  SiRNA target sequence
ggacattgccttcagtagttt

SEQ ID NO: 296010 - DNA, 21 bp, Artificial sequence
  SiRNA target sequence
gacattgccttcagtagtttt

SEQ ID NO: 296011 - DNA, 21 bp, Artificial sequence
  SiRNA target sequence
acattgccttcagtagtttta

SEQ ID NO: 296012 - DNA, 21 bp, Artificial sequence
  SiRNA target sequence
cattgccttcagtagttttaa

SEQ ID NO: 296013 - DNA, 21 bp, Artificial sequence
  SiRNA target sequence
attgccttcagtagttttaag

SEQ ID NO: 296014 - DNA, 21 bp, Artificial sequence
  SiRNA target sequence
ttgccttcagtagttttaagt

SEQ ID NO: 296015 - DNA, 21 bp, Artificial sequence
  SiRNA target sequence
tgccttcagtagttttaagtg

SEQ ID NO: 296016 - DNA, 21 bp, Artificial sequence
  SiRNA target sequence
gccttcagtagttttaagtgc

SEQ ID NO: 296017 - DNA, 21 bp, Artificial sequence
  SiRNA target sequence
ccttcagtagttttaagtgct

SEQ ID NO: 296018 - DNA, 21 bp, Artificial sequence
  SiRNA target sequence
cttcagtagttttaagtgctg

SEQ ID NO: 296019 - DNA, 21 bp, Artificial sequence
  SiRNA target sequence
ttcagtagttttaagtgctgg

SEQ ID NO: 296020 - DNA, 21 bp, Artificial sequence
  SiRNA target sequence
tcagtagttttaagtgctgga

SEQ ID NO: 296021 - DNA, 21 bp, Artificial sequence
  SiRNA target sequence
cagtagttttaagtgctggag

SEQ ID NO: 296022 - DNA, 21 bp, Artificial sequence
  SiRNA target sequence
agtagttttaagtgctggagg

SEQ ID NO: 296023 - DNA, 21 bp, Artificial sequence
  SiRNA target sequence
gtagttttaagtgctggaggt

SEQ ID NO: 296024 - DNA, 21 bp, Artificial sequence
  SiRNA target sequence
tagttttaagtgctggaggta

SEQ ID NO: 296025 - DNA, 21 bp, Artificial sequence
  SiRNA target sequence
agttttaagtgctggaggtaa

SEQ ID NO: 296026 - DNA, 21 bp, Artificial sequence
  SiRNA target sequence
gttttaagtgctggaggtaag

SEQ ID NO: 296027 - DNA, 21 bp, Artificial sequence
  SiRNA target sequence
ttttaagtgctggaggtaagg

SEQ ID NO: 296028 - DNA, 21 bp, Artificial sequence
  SiRNA target sequence
tttaagtgctggaggtaaggg

SEQ ID NO: 296029 - DNA, 21 bp, Artificial sequence
  SiRNA target sequence
ttaagtgctggaggtaaggga

SEQ ID NO: 296030 - DNA, 21 bp, Artificial sequence
  SiRNA target sequence
taagtgctggaggtaagggac

SEQ ID NO: 296031 - DNA, 21 bp, Artificial sequence
  SiRNA target sequence
aagtgctggaggtaagggaca

SEQ ID NO: 296032 - DNA, 21 bp, Artificial sequence
  SiRNA target sequence
agtgctggaggtaagggacaa

SEQ ID NO: 296033 - DNA, 21 bp, Artificial sequence
  SiRNA target sequence
gtgctggaggtaagggacaaa

SEQ ID NO: 296034 - DNA, 21 bp, Artificial sequence
  SiRNA target sequence
tgctggaggtaagggacaaaa

SEQ ID NO: 296035 - DNA, 21 bp, Artificial sequence
  SiRNA target sequence
gctggaggtaagggacaaaaa

SEQ ID NO: 296036 - DNA, 21 bp, Artificial sequence
  SiRNA target sequence
ctggaggtaagggacaaaaat

SEQ ID NO: 296037 - DNA, 21 bp, Artificial sequence
  SiRNA target sequence
tggaggtaagggacaaaaatt

SEQ ID NO: 296038 - DNA, 21 bp, Artificial sequence
  SiRNA target sequence
ggaggtaagggacaaaaatta

SEQ ID NO: 296039 - DNA, 21 bp, Artificial sequence
  SiRNA target sequence
gaggtaagggacaaaaattag

SEQ ID NO: 296040 - DNA, 21 bp, Artificial sequence
  SiRNA target sequence
aggtaagggacaaaaattagc

SEQ ID NO: 296041 - DNA, 21 bp, Artificial sequence
  SiRNA target sequence
ggtaagggacaaaaattagct

SEQ ID NO: 296042 - DNA, 21 bp, Artificial sequence
  SiRNA target sequence
gtaagggacaaaaattagcta

SEQ ID NO: 296043 - DNA, 21 bp, Artificial sequence
  SiRNA target sequence
taagggacaaaaattagctaa

SEQ ID NO: 296044 - DNA, 21 bp, Artificial sequence
  SiRNA target sequence
aagggacaaaaattagctaat

SEQ ID NO: 296045 - DNA, 21 bp, Artificial sequence
  SiRNA target sequence
agggacaaaaattagctaatt

SEQ ID NO: 296046 - DNA, 21 bp, Artificial sequence
  SiRNA target sequence
gggacaaaaattagctaattt

SEQ ID NO: 296047 - DNA, 21 bp, Artificial sequence
  SiRNA target sequence
ggacaaaaattagctaatttt

SEQ ID NO: 296048 - DNA, 21 bp, Artificial sequence
  SiRNA target sequence
gacaaaaattagctaatttta

SEQ ID NO: 296049 - DNA, 21 bp, Artificial sequence
  SiRNA target sequence
acaaaaattagctaattttaa

SEQ ID NO: 296050 - DNA, 21 bp, Artificial sequence
  SiRNA target sequence
caaaaattagctaattttaaa

SEQ ID NO: 296051 - DNA, 21 bp, Artificial sequence
  SiRNA target sequence
aaaaattagctaattttaaat

SEQ ID NO: 296052 - DNA, 21 bp, Artificial sequence
  SiRNA target sequence
aaaattagctaattttaaata

SEQ ID NO: 296053 - DNA, 21 bp, Artificial sequence
  SiRNA target sequence
aaattagctaattttaaatat

SEQ ID NO: 296054 - DNA, 21 bp, Artificial sequence
  SiRNA target sequence
aattagctaattttaaatatt

SEQ ID NO: 296055 - DNA, 21 bp, Artificial sequence
  SiRNA target sequence
attagctaattttaaatattt

SEQ ID NO: 296056 - DNA, 21 bp, Artificial sequence
  SiRNA target sequence
ttagctaattttaaatattta

SEQ ID NO: 296057 - DNA, 21 bp, Artificial sequence
  SiRNA target sequence
tagctaattttaaatatttac

SEQ ID NO: 296058 - DNA, 21 bp, Artificial sequence
  SiRNA target sequence
agctaattttaaatatttacg

SEQ ID NO: 296059 - DNA, 21 bp, Artificial sequence
  SiRNA target sequence
gctaattttaaatatttacga

SEQ ID NO: 296060 - DNA, 21 bp, Artificial sequence
  SiRNA target sequence
ctaattttaaatatttacgat

SEQ ID NO: 296061 - DNA, 21 bp, Artificial sequence
  SiRNA target sequence
taattttaaatatttacgatg

SEQ ID NO: 296062 - DNA, 21 bp, Artificial sequence
  SiRNA target sequence
aattttaaatatttacgatgt

SEQ ID NO: 296063 - DNA, 21 bp, Artificial sequence
  SiRNA target sequence
attttaaatatttacgatgtg

SEQ ID NO: 296064 - DNA, 21 bp, Artificial sequence
  SiRNA target sequence
ttttaaatatttacgatgtga

SEQ ID NO: 296065 - DNA, 21 bp, Artificial sequence
  SiRNA target sequence
tttaaatatttacgatgtgat

SEQ ID NO: 296066 - DNA, 21 bp, Artificial sequence
  SiRNA target sequence
ttaaatatttacgatgtgatg

SEQ ID NO: 296067 - DNA, 21 bp, Artificial sequence
  SiRNA target sequence
taaatatttacgatgtgatgt

SEQ ID NO: 296068 - DNA, 21 bp, Artificial sequence
  SiRNA target sequence
aaatatttacgatgtgatgtt

SEQ ID NO: 296069 - DNA, 21 bp, Artificial sequence
  SiRNA target sequence
aatatttacgatgtgatgtta

SEQ ID NO: 296070 - DNA, 21 bp, Artificial sequence
  SiRNA target sequence
atatttacgatgtgatgttaa

SEQ ID NO: 296071 - DNA, 21 bp, Artificial sequence
  SiRNA target sequence
tatttacgatgtgatgttaaa

SEQ ID NO: 296072 - DNA, 21 bp, Artificial sequence
  SiRNA target sequence
atttacgatgtgatgttaaag

SEQ ID NO: 296073 - DNA, 21 bp, Artificial sequence
  SiRNA target sequence
tttacgatgtgatgttaaagt

SEQ ID NO: 296074 - DNA, 21 bp, Artificial sequence
  SiRNA target sequence
ttacgatgtgatgttaaagtc

SEQ ID NO: 296075 - DNA, 21 bp, Artificial sequence
  SiRNA target sequence
tacgatgtgatgttaaagtca

SEQ ID NO: 296076 - DNA, 21 bp, Artificial sequence
  SiRNA target sequence
acgatgtgatgttaaagtcaa

SEQ ID NO: 296077 - DNA, 21 bp, Artificial sequence
  SiRNA target sequence
cgatgtgatgttaaagtcaaa

SEQ ID NO: 296078 - DNA, 21 bp, Artificial sequence
  SiRNA target sequence
gatgtgatgttaaagtcaaaa

SEQ ID NO: 296079 - DNA, 21 bp, Artificial sequence
  SiRNA target sequence
atgtgatgttaaagtcaaaat

SEQ ID NO: 296080 - DNA, 21 bp, Artificial sequence
  SiRNA target sequence
tgtgatgttaaagtcaaaatt

SEQ ID NO: 296081 - DNA, 21 bp, Artificial sequence
  SiRNA target sequence
gtgatgttaaagtcaaaattg

SEQ ID NO: 296082 - DNA, 21 bp, Artificial sequence
  SiRNA target sequence
tgatgttaaagtcaaaattgt

SEQ ID NO: 296083 - DNA, 21 bp, Artificial sequence
  SiRNA target sequence
gatgttaaagtcaaaattgtt

SEQ ID NO: 296084 - DNA, 21 bp, Artificial sequence
  SiRNA target sequence
atgttaaagtcaaaattgttc

SEQ ID NO: 296085 - DNA, 21 bp, Artificial sequence
  SiRNA target sequence
tgttaaagtcaaaattgttct

SEQ ID NO: 296086 - DNA, 21 bp, Artificial sequence
  SiRNA target sequence
gttaaagtcaaaattgttcta

SEQ ID NO: 296087 - DNA, 21 bp, Artificial sequence
  SiRNA target sequence
ttaaagtcaaaattgttctaa

SEQ ID NO: 296088 - DNA, 21 bp, Artificial sequence
  SiRNA target sequence
taaagtcaaaattgttctaaa

SEQ ID NO: 296089 - DNA, 21 bp, Artificial sequence
  SiRNA target sequence
aaagtcaaaattgttctaaac

SEQ ID NO: 296090 - DNA, 21 bp, Artificial sequence
  SiRNA target sequence
aagtcaaaattgttctaaacg

SEQ ID NO: 296091 - DNA, 21 bp, Artificial sequence
  SiRNA target sequence
agtcaaaattgttctaaacgc

SEQ ID NO: 296092 - DNA, 21 bp, Artificial sequence
  SiRNA target sequence
gtcaaaattgttctaaacgca

SEQ ID NO: 296093 - DNA, 21 bp, Artificial sequence
  SiRNA target sequence
tcaaaattgttctaaacgcaa

SEQ ID NO: 296094 - DNA, 21 bp, Artificial sequence
  SiRNA target sequence
caaaattgttctaaacgcaaa

SEQ ID NO: 296095 - DNA, 21 bp, Artificial sequence
  SiRNA target sequence
aaaattgttctaaacgcaaat

SEQ ID NO: 296096 - DNA, 21 bp, Artificial sequence
  SiRNA target sequence
aaattgttctaaacgcaaatc

SEQ ID NO: 296097 - DNA, 21 bp, Artificial sequence
  SiRNA target sequence
aattgttctaaacgcaaatcc

SEQ ID NO: 296098 - DNA, 21 bp, Artificial sequence
  SiRNA target sequence
attgttctaaacgcaaatcct

SEQ ID NO: 296099 - DNA, 21 bp, Artificial sequence
  SiRNA target sequence
ttgttctaaacgcaaatcctt

SEQ ID NO: 296100 - DNA, 21 bp, Artificial sequence
  SiRNA target sequence
tgttctaaacgcaaatccttt

SEQ ID NO: 296101 - DNA, 21 bp, Artificial sequence
  SiRNA target sequence
gttctaaacgcaaatcctttc

SEQ ID NO: 296102 - DNA, 21 bp, Artificial sequence
  SiRNA target sequence
ttctaaacgcaaatcctttca

SEQ ID NO: 296103 - DNA, 21 bp, Artificial sequence
  SiRNA target sequence
tctaaacgcaaatcctttcat

SEQ ID NO: 296104 - DNA, 21 bp, Artificial sequence
  SiRNA target sequence
ctaaacgcaaatcctttcata

SEQ ID NO: 296105 - DNA, 21 bp, Artificial sequence
  SiRNA target sequence
taaacgcaaatcctttcatag

SEQ ID NO: 296106 - DNA, 21 bp, Artificial sequence
  SiRNA target sequence
aaacgcaaatcctttcatagc

SEQ ID NO: 296107 - DNA, 21 bp, Artificial sequence
  SiRNA target sequence
aacgcaaatcctttcatagct

SEQ ID NO: 296108 - DNA, 21 bp, Artificial sequence
  SiRNA target sequence
acgcaaatcctttcatagctg

SEQ ID NO: 296109 - DNA, 21 bp, Artificial sequence
  SiRNA target sequence
cgcaaatcctttcatagctgg

SEQ ID NO: 296110 - DNA, 21 bp, Artificial sequence
  SiRNA target sequence
gcaaatcctttcatagctgga

SEQ ID NO: 296111 - DNA, 21 bp, Artificial sequence
  SiRNA target sequence
caaatcctttcatagctggaa

SEQ ID NO: 296112 - DNA, 21 bp, Artificial sequence
  SiRNA target sequence
aaatcctttcatagctggaag

SEQ ID NO: 296113 - DNA, 21 bp, Artificial sequence
  SiRNA target sequence
aatcctttcatagctggaaga

SEQ ID NO: 296114 - DNA, 21 bp, Artificial sequence
  SiRNA target sequence
atcctttcatagctggaagat

SEQ ID NO: 296115 - DNA, 21 bp, Artificial sequence
  SiRNA target sequence
tcctttcatagctggaagatt

SEQ ID NO: 296116 - DNA, 21 bp, Artificial sequence
  SiRNA target sequence
cctttcatagctggaagatta

SEQ ID NO: 296117 - DNA, 21 bp, Artificial sequence
  SiRNA target sequence
ctttcatagctggaagattat

SEQ ID NO: 296118 - DNA, 21 bp, Artificial sequence
  SiRNA target sequence
tttcatagctggaagattata

SEQ ID NO: 296119 - DNA, 21 bp, Artificial sequence
  SiRNA target sequence
ttcatagctggaagattatac

SEQ ID NO: 296120 - DNA, 21 bp, Artificial sequence
  SiRNA target sequence
tcatagctggaagattatact

SEQ ID NO: 296121 - DNA, 21 bp, Artificial sequence
  SiRNA target sequence
catagctggaagattatactt

SEQ ID NO: 296122 - DNA, 21 bp, Artificial sequence
  SiRNA target sequence
atagctggaagattatactta

SEQ ID NO: 296123 - DNA, 21 bp, Artificial sequence
  SiRNA target sequence
tagctggaagattatacttag

SEQ ID NO: 296124 - DNA, 21 bp, Artificial sequence
  SiRNA target sequence
agctggaagattatacttagc

SEQ ID NO: 296125 - DNA, 21 bp, Artificial sequence
  SiRNA target sequence
gctggaagattatacttagca

SEQ ID NO: 296126 - DNA, 21 bp, Artificial sequence
  SiRNA target sequence
ctggaagattatacttagcat

SEQ ID NO: 296127 - DNA, 21 bp, Artificial sequence
  SiRNA target sequence
tggaagattatacttagcata

SEQ ID NO: 296128 - DNA, 21 bp, Artificial sequence
  SiRNA target sequence
ggaagattatacttagcatat

SEQ ID NO: 296129 - DNA, 21 bp, Artificial sequence
  SiRNA target sequence
gaagattatacttagcatatt

SEQ ID NO: 296130 - DNA, 21 bp, Artificial sequence
  SiRNA target sequence
aagattatacttagcatattc

SEQ ID NO: 296131 - DNA, 21 bp, Artificial sequence
  SiRNA target sequence
agattatacttagcatattca

SEQ ID NO: 296132 - DNA, 21 bp, Artificial sequence
  SiRNA target sequence
gattatacttagcatattcac

SEQ ID NO: 296133 - DNA, 21 bp, Artificial sequence
  SiRNA target sequence
attatacttagcatattcacc

SEQ ID NO: 296134 - DNA, 21 bp, Artificial sequence
  SiRNA target sequence
ttatacttagcatattcacct

SEQ ID NO: 296135 - DNA, 21 bp, Artificial sequence
  SiRNA target sequence
tatacttagcatattcacctt

SEQ ID NO: 296136 - DNA, 21 bp, Artificial sequence
  SiRNA target sequence
atacttagcatattcacctta

SEQ ID NO: 296137 - DNA, 21 bp, Artificial sequence
  SiRNA target sequence
tacttagcatattcaccttat

SEQ ID NO: 296138 - DNA, 21 bp, Artificial sequence
  SiRNA target sequence
acttagcatattcaccttatg

SEQ ID NO: 296139 - DNA, 21 bp, Artificial sequence
  SiRNA target sequence
cttagcatattcaccttatga

SEQ ID NO: 296140 - DNA, 21 bp, Artificial sequence
  SiRNA target sequence
ttagcatattcaccttatgat

SEQ ID NO: 296141 - DNA, 21 bp, Artificial sequence
  SiRNA target sequence
tagcatattcaccttatgatg

SEQ ID NO: 296142 - DNA, 21 bp, Artificial sequence
  SiRNA target sequence
agcatattcaccttatgatga

SEQ ID NO: 296143 - DNA, 21 bp, Artificial sequence
  SiRNA target sequence
gcatattcaccttatgatgac

SEQ ID NO: 296144 - DNA, 21 bp, Artificial sequence
  SiRNA target sequence
catattcaccttatgatgacc

SEQ ID NO: 296145 - DNA, 21 bp, Artificial sequence
  SiRNA target sequence
atattcaccttatgatgaccg

SEQ ID NO: 296146 - DNA, 21 bp, Artificial sequence
  SiRNA target sequence
tattcaccttatgatgaccga

SEQ ID NO: 296147 - DNA, 21 bp, Artificial sequence
  SiRNA target sequence
attcaccttatgatgaccgag

SEQ ID NO: 296148 - DNA, 21 bp, Artificial sequence
  SiRNA target sequence
ttcaccttatgatgaccgagt

SEQ ID NO: 296149 - DNA, 21 bp, Artificial sequence
  SiRNA target sequence
tcaccttatgatgaccgagtg

SEQ ID NO: 296150 - DNA, 21 bp, Artificial sequence
  SiRNA target sequence
caccttatgatgaccgagtgg

SEQ ID NO: 296151 - DNA, 21 bp, Artificial sequence
  SiRNA target sequence
accttatgatgaccgagtgga

SEQ ID NO: 296152 - DNA, 21 bp, Artificial sequence
  SiRNA target sequence
ccttatgatgaccgagtggac

SEQ ID NO: 296153 - DNA, 21 bp, Artificial sequence
  SiRNA target sequence
cttatgatgaccgagtggacc

SEQ ID NO: 296154 - DNA, 21 bp, Artificial sequence
  SiRNA target sequence
ttatgatgaccgagtggaccc

SEQ ID NO: 296155 - DNA, 21 bp, Artificial sequence
  SiRNA target sequence
tatgatgaccgagtggaccca

SEQ ID NO: 296156 - DNA, 21 bp, Artificial sequence
  SiRNA target sequence
atgatgaccgagtggacccag

SEQ ID NO: 296157 - DNA, 21 bp, Artificial sequence
  SiRNA target sequence
tgatgaccgagtggacccagc

SEQ ID NO: 296158 - DNA, 21 bp, Artificial sequence
  SiRNA target sequence
gatgaccgagtggacccagcg

SEQ ID NO: 296159 - DNA, 21 bp, Artificial sequence
  SiRNA target sequence
atgaccgagtggacccagcgc

SEQ ID NO: 296160 - DNA, 21 bp, Artificial sequence
  SiRNA target sequence
tgaccgagtggacccagcgcg

SEQ ID NO: 296161 - DNA, 21 bp, Artificial sequence
  SiRNA target sequence
gaccgagtggacccagcgcgt

SEQ ID NO: 296162 - DNA, 21 bp, Artificial sequence
  SiRNA target sequence
accgagtggacccagcgcgtt

SEQ ID NO: 296163 - DNA, 21 bp, Artificial sequence
  SiRNA target sequence
ccgagtggacccagcgcgttc

SEQ ID NO: 296164 - DNA, 21 bp, Artificial sequence
  SiRNA target sequence
cgagtggacccagcgcgttca

SEQ ID NO: 296165 - DNA, 21 bp, Artificial sequence
  SiRNA target sequence
gagtggacccagcgcgttcaa

SEQ ID NO: 296166 - DNA, 21 bp, Artificial sequence
  SiRNA target sequence
agtggacccagcgcgttcaat

SEQ ID NO: 296167 - DNA, 21 bp, Artificial sequence
  SiRNA target sequence
gtggacccagcgcgttcaatt

SEQ ID NO: 296168 - DNA, 21 bp, Artificial sequence
  SiRNA target sequence
tggacccagcgcgttcaattt

SEQ ID NO: 296169 - DNA, 21 bp, Artificial sequence
  SiRNA target sequence
ggacccagcgcgttcaatttt

SEQ ID NO: 296170 - DNA, 21 bp, Artificial sequence
  SiRNA target sequence
gacccagcgcgttcaatttta

SEQ ID NO: 296171 - DNA, 21 bp, Artificial sequence
  SiRNA target sequence
acccagcgcgttcaattttaa

SEQ ID NO: 296172 - DNA, 21 bp, Artificial sequence
  SiRNA target sequence
cccagcgcgttcaattttaaa

SEQ ID NO: 296173 - DNA, 21 bp, Artificial sequence
  SiRNA target sequence
ccagcgcgttcaattttaaac

SEQ ID NO: 296174 - DNA, 21 bp, Artificial sequence
  SiRNA target sequence
cagcgcgttcaattttaaaca

SEQ ID NO: 296175 - DNA, 21 bp, Artificial sequence
  SiRNA target sequence
agcgcgttcaattttaaacac

SEQ ID NO: 296176 - DNA, 21 bp, Artificial sequence
  SiRNA target sequence
gcgcgttcaattttaaacacc

SEQ ID NO: 296177 - DNA, 21 bp, Artificial sequence
  SiRNA target sequence
cgcgttcaattttaaacacct

SEQ ID NO: 296178 - DNA, 21 bp, Artificial sequence
  SiRNA target sequence
gcgttcaattttaaacacctc

SEQ ID NO: 296179 - DNA, 21 bp, Artificial sequence
  SiRNA target sequence
cgttcaattttaaacacctca

SEQ ID NO: 296180 - DNA, 21 bp, Artificial sequence
  SiRNA target sequence
gttcaattttaaacacctcac

SEQ ID NO: 296181 - DNA, 21 bp, Artificial sequence
  SiRNA target sequence
ttcaattttaaacacctcacg

SEQ ID NO: 296182 - DNA, 21 bp, Artificial sequence
  SiRNA target sequence
tcaattttaaacacctcacga

SEQ ID NO: 296183 - DNA, 21 bp, Artificial sequence
  SiRNA target sequence
caattttaaacacctcacgag

SEQ ID NO: 296184 - DNA, 21 bp, Artificial sequence
  SiRNA target sequence
aattttaaacacctcacgagc

SEQ ID NO: 296185 - DNA, 21 bp, Artificial sequence
  SiRNA target sequence
attttaaacacctcacgagct

SEQ ID NO: 296186 - DNA, 21 bp, Artificial sequence
  SiRNA target sequence
ttttaaacacctcacgagctg

SEQ ID NO: 296187 - DNA, 21 bp, Artificial sequence
  SiRNA target sequence
tttaaacacctcacgagctgg

SEQ ID NO: 296188 - DNA, 21 bp, Artificial sequence
  SiRNA target sequence
ttaaacacctcacgagctgga

SEQ ID NO: 296189 - DNA, 21 bp, Artificial sequence
  SiRNA target sequence
taaacacctcacgagctggag

SEQ ID NO: 296190 - DNA, 21 bp, Artificial sequence
  SiRNA target sequence
aaacacctcacgagctggagt

SEQ ID NO: 296191 - DNA, 21 bp, Artificial sequence
  SiRNA target sequence
aacacctcacgagctggagtt

SEQ ID NO: 296192 - DNA, 21 bp, Artificial sequence
  SiRNA target sequence
acacctcacgagctggagtta

SEQ ID NO: 296193 - DNA, 21 bp, Artificial sequence
  SiRNA target sequence
cacctcacgagctggagttac

SEQ ID NO: 296194 - DNA, 21 bp, Artificial sequence
  SiRNA target sequence
acctcacgagctggagttacg

SEQ ID NO: 296195 - DNA, 21 bp, Artificial sequence
  SiRNA target sequence
cctcacgagctggagttacgg

SEQ ID NO: 296196 - DNA, 21 bp, Artificial sequence
  SiRNA target sequence
ctcacgagctggagttacggg

SEQ ID NO: 296197 - DNA, 21 bp, Artificial sequence
  SiRNA target sequence
tcacgagctggagttacggga

SEQ ID NO: 296198 - DNA, 21 bp, Artificial sequence
  SiRNA target sequence
cacgagctggagttacgggat

SEQ ID NO: 296199 - DNA, 21 bp, Artificial sequence
  SiRNA target sequence
acgagctggagttacgggata

SEQ ID NO: 296200 - DNA, 21 bp, Artificial sequence
  SiRNA target sequence
cgagctggagttacgggatac

SEQ ID NO: 296201 - DNA, 21 bp, Artificial sequence
  SiRNA target sequence
gagctggagttacgggatacc

SEQ ID NO: 296202 - DNA, 21 bp, Artificial sequence
  SiRNA target sequence
agctggagttacgggataccc

SEQ ID NO: 296203 - DNA, 21 bp, Artificial sequence
  SiRNA target sequence
gctggagttacgggataccct

SEQ ID NO: 296204 - DNA, 21 bp, Artificial sequence
  SiRNA target sequence
ctggagttacgggataccctg

SEQ ID NO: 296205 - DNA, 21 bp, Artificial sequence
  SiRNA target sequence
tggagttacgggataccctgg

SEQ ID NO: 296206 - DNA, 21 bp, Artificial sequence
  SiRNA target sequence
ggagttacgggataccctgga

SEQ ID NO: 296207 - DNA, 21 bp, Artificial sequence
  SiRNA target sequence
gagttacgggataccctggaa

SEQ ID NO: 296208 - DNA, 21 bp, Artificial sequence
  SiRNA target sequence
agttacgggataccctggaat

SEQ ID NO: 296209 - DNA, 21 bp, Artificial sequence
  SiRNA target sequence
gttacgggataccctggaata

SEQ ID NO: 296210 - DNA, 21 bp, Artificial sequence
  SiRNA target sequence
ttacgggataccctggaatag

SEQ ID NO: 296211 - DNA, 21 bp, Artificial sequence
  SiRNA target sequence
tacgggataccctggaataga

SEQ ID NO: 296212 - DNA, 21 bp, Artificial sequence
  SiRNA target sequence
acgggataccctggaatagag

SEQ ID NO: 296213 - DNA, 21 bp, Artificial sequence
  SiRNA target sequence
cgggataccctggaatagaga

SEQ ID NO: 296214 - DNA, 21 bp, Artificial sequence
  SiRNA target sequence
gggataccctggaatagagat

SEQ ID NO: 296215 - DNA, 21 bp, Artificial sequence
  SiRNA target sequence
ggataccctggaatagagatt

SEQ ID NO: 296216 - DNA, 21 bp, Artificial sequence
  SiRNA target sequence
gataccctggaatagagattg

SEQ ID NO: 296217 - DNA, 21 bp, Artificial sequence
  SiRNA target sequence
ataccctggaatagagattga

SEQ ID NO: 296218 - DNA, 21 bp, Artificial sequence
  SiRNA target sequence
taccctggaatagagattgat

SEQ ID NO: 296219 - DNA, 21 bp, Artificial sequence
  SiRNA target sequence
accctggaatagagattgatt

SEQ ID NO: 296220 - DNA, 21 bp, Artificial sequence
  SiRNA target sequence
ccctggaatagagattgattt

SEQ ID NO: 296221 - DNA, 21 bp, Artificial sequence
  SiRNA target sequence
cctggaatagagattgatttt

SEQ ID NO: 296222 - DNA, 21 bp, Artificial sequence
  SiRNA target sequence
ctggaatagagattgattttc

SEQ ID NO: 296223 - DNA, 21 bp, Artificial sequence
  SiRNA target sequence
tggaatagagattgattttca

SEQ ID NO: 296224 - DNA, 21 bp, Artificial sequence
  SiRNA target sequence
ggaatagagattgattttcaa

SEQ ID NO: 296225 - DNA, 21 bp, Artificial sequence
  SiRNA target sequence
gaatagagattgattttcaat

SEQ ID NO: 296226 - DNA, 21 bp, Artificial sequence
  SiRNA target sequence
aatagagattgattttcaatt

SEQ ID NO: 296227 - DNA, 21 bp, Artificial sequence
  SiRNA target sequence
atagagattgattttcaatta

SEQ ID NO: 296228 - DNA, 21 bp, Artificial sequence
  SiRNA target sequence
tagagattgattttcaattag

SEQ ID NO: 296229 - DNA, 21 bp, Artificial sequence
  SiRNA target sequence
agagattgattttcaattaga

SEQ ID NO: 296230 - DNA, 21 bp, Artificial sequence
  SiRNA target sequence
gagattgattttcaattagat

SEQ ID NO: 296231 - DNA, 21 bp, Artificial sequence
  SiRNA target sequence
agattgattttcaattagata

SEQ ID NO: 296232 - DNA, 21 bp, Artificial sequence
  SiRNA target sequence
gattgattttcaattagataa

SEQ ID NO: 296233 - DNA, 21 bp, Artificial sequence
  SiRNA target sequence
attgattttcaattagataat

SEQ ID NO: 296234 - DNA, 21 bp, Artificial sequence
  SiRNA target sequence
ttgattttcaattagataatt

SEQ ID NO: 296235 - DNA, 21 bp, Artificial sequence
  SiRNA target sequence
tgattttcaattagataattc

SEQ ID NO: 296236 - DNA, 21 bp, Artificial sequence
  SiRNA target sequence
gattttcaattagataattcc

SEQ ID NO: 296237 - DNA, 21 bp, Artificial sequence
  SiRNA target sequence
attttcaattagataattccg

SEQ ID NO: 296238 - DNA, 21 bp, Artificial sequence
  SiRNA target sequence
ttttcaattagataattccgt

SEQ ID NO: 296239 - DNA, 21 bp, Artificial sequence
  SiRNA target sequence
tttcaattagataattccgta

SEQ ID NO: 296240 - DNA, 21 bp, Artificial sequence
  SiRNA target sequence
ttcaattagataattccgtag

SEQ ID NO: 296241 - DNA, 21 bp, Artificial sequence
  SiRNA target sequence
tcaattagataattccgtaga

SEQ ID NO: 296242 - DNA, 21 bp, Artificial sequence
  SiRNA target sequence
caattagataattccgtagaa

SEQ ID NO: 296243 - DNA, 21 bp, Artificial sequence
  SiRNA target sequence
aattagataattccgtagaaa

SEQ ID NO: 296244 - DNA, 21 bp, Artificial sequence
  SiRNA target sequence
attagataattccgtagaaat

SEQ ID NO: 296245 - DNA, 21 bp, Artificial sequence
  SiRNA target sequence
ttagataattccgtagaaatg

SEQ ID NO: 296246 - DNA, 21 bp, Artificial sequence
  SiRNA target sequence
tagataattccgtagaaatga

SEQ ID NO: 296247 - DNA, 21 bp, Artificial sequence
  SiRNA target sequence
agataattccgtagaaatgac

SEQ ID NO: 296248 - DNA, 21 bp, Artificial sequence
  SiRNA target sequence
gataattccgtagaaatgacc

SEQ ID NO: 296249 - DNA, 21 bp, Artificial sequence
  SiRNA target sequence
ataattccgtagaaatgacca

SEQ ID NO: 296250 - DNA, 21 bp, Artificial sequence
  SiRNA target sequence
taattccgtagaaatgaccat

SEQ ID NO: 296251 - DNA, 21 bp, Artificial sequence
  SiRNA target sequence
aattccgtagaaatgaccata

SEQ ID NO: 296252 - DNA, 21 bp, Artificial sequence
  SiRNA target sequence
attccgtagaaatgaccatac

SEQ ID NO: 296253 - DNA, 21 bp, Artificial sequence
  SiRNA target sequence
ttccgtagaaatgaccatacc

SEQ ID NO: 296254 - DNA, 21 bp, Artificial sequence
  SiRNA target sequence
tccgtagaaatgaccatacca

SEQ ID NO: 296255 - DNA, 21 bp, Artificial sequence
  SiRNA target sequence
ccgtagaaatgaccataccat

SEQ ID NO: 296256 - DNA, 21 bp, Artificial sequence
  SiRNA target sequence
cgtagaaatgaccataccata

SEQ ID NO: 296257 - DNA, 21 bp, Artificial sequence
  SiRNA target sequence
gtagaaatgaccataccatac

SEQ ID NO: 296258 - DNA, 21 bp, Artificial sequence
  SiRNA target sequence
tagaaatgaccataccatacg

SEQ ID NO: 296259 - DNA, 21 bp, Artificial sequence
  SiRNA target sequence
agaaatgaccataccatacgc

SEQ ID NO: 296260 - DNA, 21 bp, Artificial sequence
  SiRNA target sequence
gaaatgaccataccatacgct

SEQ ID NO: 296261 - DNA, 21 bp, Artificial sequence
  SiRNA target sequence
aaatgaccataccatacgctt

SEQ ID NO: 296262 - DNA, 21 bp, Artificial sequence
  SiRNA target sequence
aatgaccataccatacgcttc

SEQ ID NO: 296263 - DNA, 21 bp, Artificial sequence
  SiRNA target sequence
atgaccataccatacgcttct

SEQ ID NO: 296264 - DNA, 21 bp, Artificial sequence
  SiRNA target sequence
tgaccataccatacgcttctt

SEQ ID NO: 296265 - DNA, 21 bp, Artificial sequence
  SiRNA target sequence
gaccataccatacgcttcttt

SEQ ID NO: 296266 - DNA, 21 bp, Artificial sequence
  SiRNA target sequence
accataccatacgcttctttt

SEQ ID NO: 296267 - DNA, 21 bp, Artificial sequence
  SiRNA target sequence
ccataccatacgcttcttttc

SEQ ID NO: 296268 - DNA, 21 bp, Artificial sequence
  SiRNA target sequence
cataccatacgcttcttttca

SEQ ID NO: 296269 - DNA, 21 bp, Artificial sequence
  SiRNA target sequence
ataccatacgcttcttttcaa

SEQ ID NO: 296270 - DNA, 21 bp, Artificial sequence
  SiRNA target sequence
taccatacgcttcttttcaag

SEQ ID NO: 296271 - DNA, 21 bp, Artificial sequence
  SiRNA target sequence
accatacgcttcttttcaaga

SEQ ID NO: 296272 - DNA, 21 bp, Artificial sequence
  SiRNA target sequence
ccatacgcttcttttcaagaa

SEQ ID NO: 296273 - DNA, 21 bp, Artificial sequence
  SiRNA target sequence
catacgcttcttttcaagaag

SEQ ID NO: 296274 - DNA, 21 bp, Artificial sequence
  SiRNA target sequence
atacgcttcttttcaagaagc

SEQ ID NO: 296275 - DNA, 21 bp, Artificial sequence
  SiRNA target sequence
tacgcttcttttcaagaagca

SEQ ID NO: 296276 - DNA, 21 bp, Artificial sequence
  SiRNA target sequence
acgcttcttttcaagaagcat

SEQ ID NO: 296277 - DNA, 21 bp, Artificial sequence
  SiRNA target sequence
cgcttcttttcaagaagcata

SEQ ID NO: 296278 - DNA, 21 bp, Artificial sequence
  SiRNA target sequence
gcttcttttcaagaagcatat

SEQ ID NO: 296279 - DNA, 21 bp, Artificial sequence
  SiRNA target sequence
cttcttttcaagaagcatatg

SEQ ID NO: 296280 - DNA, 21 bp, Artificial sequence
  SiRNA target sequence
ttcttttcaagaagcatatga

SEQ ID NO: 296281 - DNA, 21 bp, Artificial sequence
  SiRNA target sequence
tcttttcaagaagcatatgat

SEQ ID NO: 296282 - DNA, 21 bp, Artificial sequence
  SiRNA target sequence
cttttcaagaagcatatgatt

SEQ ID NO: 296283 - DNA, 21 bp, Artificial sequence
  SiRNA target sequence
ttttcaagaagcatatgattt

SEQ ID NO: 296284 - DNA, 21 bp, Artificial sequence
  SiRNA target sequence
tttcaagaagcatatgattta

SEQ ID NO: 296285 - DNA, 21 bp, Artificial sequence
  SiRNA target sequence
ttcaagaagcatatgatttag

SEQ ID NO: 296286 - DNA, 21 bp, Artificial sequence
  SiRNA target sequence
tcaagaagcatatgatttagt

SEQ ID NO: 296287 - DNA, 21 bp, Artificial sequence
  SiRNA target sequence
caagaagcatatgatttagtc

SEQ ID NO: 296288 - DNA, 21 bp, Artificial sequence
  SiRNA target sequence
aagaagcatatgatttagtca

SEQ ID NO: 296289 - DNA, 21 bp, Artificial sequence
  SiRNA target sequence
agaagcatatgatttagtcac

SEQ ID NO: 296290 - DNA, 21 bp, Artificial sequence
  SiRNA target sequence
gaagcatatgatttagtcaca

SEQ ID NO: 296291 - DNA, 21 bp, Artificial sequence
  SiRNA target sequence
aagcatatgatttagtcacag

SEQ ID NO: 296292 - DNA, 21 bp, Artificial sequence
  SiRNA target sequence
agcatatgatttagtcacagg

SEQ ID NO: 296293 - DNA, 21 bp, Artificial sequence
  SiRNA target sequence
gcatatgatttagtcacaggt

SEQ ID NO: 296294 - DNA, 21 bp, Artificial sequence
  SiRNA target sequence
catatgatttagtcacaggta

SEQ ID NO: 296295 - DNA, 21 bp, Artificial sequence
  SiRNA target sequence
atatgatttagtcacaggtac

SEQ ID NO: 296296 - DNA, 21 bp, Artificial sequence
  SiRNA target sequence
tatgatttagtcacaggtact

SEQ ID NO: 296297 - DNA, 21 bp, Artificial sequence
  SiRNA target sequence
atgatttagtcacaggtactg

SEQ ID NO: 296298 - DNA, 21 bp, Artificial sequence
  SiRNA target sequence
tgatttagtcacaggtactga

SEQ ID NO: 296299 - DNA, 21 bp, Artificial sequence
  SiRNA target sequence
gatttagtcacaggtactgaa

SEQ ID NO: 296300 - DNA, 21 bp, Artificial sequence
  SiRNA target sequence
atttagtcacaggtactgaag

SEQ ID NO: 296301 - DNA, 21 bp, Artificial sequence
  SiRNA target sequence
tttagtcacaggtactgaaga

SEQ ID NO: 296302 - DNA, 21 bp, Artificial sequence
  SiRNA target sequence
ttagtcacaggtactgaagat

SEQ ID NO: 296303 - DNA, 21 bp, Artificial sequence
  SiRNA target sequence
tagtcacaggtactgaagatt

SEQ ID NO: 296304 - DNA, 21 bp, Artificial sequence
  SiRNA target sequence
agtcacaggtactgaagattt

SEQ ID NO: 296305 - DNA, 21 bp, Artificial sequence
  SiRNA target sequence
gtcacaggtactgaagatttt

SEQ ID NO: 296306 - DNA, 21 bp, Artificial sequence
  SiRNA target sequence
tcacaggtactgaagattttg

SEQ ID NO: 296307 - DNA, 21 bp, Artificial sequence
  SiRNA target sequence
cacaggtactgaagattttgt

SEQ ID NO: 296308 - DNA, 21 bp, Artificial sequence
  SiRNA target sequence
acaggtactgaagattttgtc

SEQ ID NO: 296309 - DNA, 21 bp, Artificial sequence
  SiRNA target sequence
caggtactgaagattttgtca

SEQ ID NO: 296310 - DNA, 21 bp, Artificial sequence
  SiRNA target sequence
aggtactgaagattttgtcaa

SEQ ID NO: 296311 - DNA, 21 bp, Artificial sequence
  SiRNA target sequence
ggtactgaagattttgtcaag

SEQ ID NO: 296312 - DNA, 21 bp, Artificial sequence
  SiRNA target sequence
gtactgaagattttgtcaagc

SEQ ID NO: 296313 - DNA, 21 bp, Artificial sequence
  SiRNA target sequence
tactgaagattttgtcaagct

SEQ ID NO: 296314 - DNA, 21 bp, Artificial sequence
  SiRNA target sequence
actgaagattttgtcaagcta

SEQ ID NO: 296315 - DNA, 21 bp, Artificial sequence
  SiRNA target sequence
ctgaagattttgtcaagctat

SEQ ID NO: 296316 - DNA, 21 bp, Artificial sequence
  SiRNA target sequence
tgaagattttgtcaagctata

SEQ ID NO: 296317 - DNA, 21 bp, Artificial sequence
  SiRNA target sequence
gaagattttgtcaagctatat

SEQ ID NO: 296318 - DNA, 21 bp, Artificial sequence
  SiRNA target sequence
aagattttgtcaagctatatc

SEQ ID NO: 296319 - DNA, 21 bp, Artificial sequence
  SiRNA target sequence
agattttgtcaagctatatct

SEQ ID NO: 296320 - DNA, 21 bp, Artificial sequence
  SiRNA target sequence
gattttgtcaagctatatcta

SEQ ID NO: 296321 - DNA, 21 bp, Artificial sequence
  SiRNA target sequence
attttgtcaagctatatctat

SEQ ID NO: 296322 - DNA, 21 bp, Artificial sequence
  SiRNA target sequence
ttttgtcaagctatatctatt

SEQ ID NO: 296323 - DNA, 21 bp, Artificial sequence
  SiRNA target sequence
tttgtcaagctatatctattt

SEQ ID NO: 296324 - DNA, 21 bp, Artificial sequence
  SiRNA target sequence
ttgtcaagctatatctattta

SEQ ID NO: 296325 - DNA, 21 bp, Artificial sequence
  SiRNA target sequence
tgtcaagctatatctatttac

SEQ ID NO: 296326 - DNA, 21 bp, Artificial sequence
  SiRNA target sequence
gtcaagctatatctatttaca

SEQ ID NO: 296327 - DNA, 21 bp, Artificial sequence
  SiRNA target sequence
tcaagctatatctatttacaa

SEQ ID NO: 296328 - DNA, 21 bp, Artificial sequence
  SiRNA target sequence
caagctatatctatttacaat

SEQ ID NO: 296329 - DNA, 21 bp, Artificial sequence
  SiRNA target sequence
aagctatatctatttacaata

SEQ ID NO: 296330 - DNA, 21 bp, Artificial sequence
  SiRNA target sequence
agctatatctatttacaataa

SEQ ID NO: 296331 - DNA, 21 bp, Artificial sequence
  SiRNA target sequence
gctatatctatttacaataac

SEQ ID NO: 296332 - DNA, 21 bp, Artificial sequence
  SiRNA target sequence
ctatatctatttacaataacg

SEQ ID NO: 296333 - DNA, 21 bp, Artificial sequence
  SiRNA target sequence
tatatctatttacaataacgc

SEQ ID NO: 296334 - DNA, 21 bp, Artificial sequence
  SiRNA target sequence
atatctatttacaataacgcc

SEQ ID NO: 296335 - DNA, 21 bp, Artificial sequence
  SiRNA target sequence
tatctatttacaataacgccc

SEQ ID NO: 296336 - DNA, 21 bp, Artificial sequence
  SiRNA target sequence
atctatttacaataacgccca

SEQ ID NO: 296337 - DNA, 21 bp, Artificial sequence
  SiRNA target sequence
tctatttacaataacgcccat

SEQ ID NO: 296338 - DNA, 21 bp, Artificial sequence
  SiRNA target sequence
ctatttacaataacgcccata

SEQ ID NO: 296339 - DNA, 21 bp, Artificial sequence
  SiRNA target sequence
tatttacaataacgcccatat

SEQ ID NO: 296340 - DNA, 21 bp, Artificial sequence
  SiRNA target sequence
atttacaataacgcccatatt

SEQ ID NO: 296341 - DNA, 21 bp, Artificial sequence
  SiRNA target sequence
tttacaataacgcccatatta

SEQ ID NO: 296342 - DNA, 21 bp, Artificial sequence
  SiRNA target sequence
ttacaataacgcccatattat

SEQ ID NO: 296343 - DNA, 21 bp, Artificial sequence
  SiRNA target sequence
tacaataacgcccatattatc

SEQ ID NO: 296344 - DNA, 21 bp, Artificial sequence
  SiRNA target sequence
acaataacgcccatattatcc

SEQ ID NO: 296345 - DNA, 21 bp, Artificial sequence
  SiRNA target sequence
caataacgcccatattatccc

SEQ ID NO: 296346 - DNA, 21 bp, Artificial sequence
  SiRNA target sequence
aataacgcccatattatcccc

SEQ ID NO: 296347 - DNA, 21 bp, Artificial sequence
  SiRNA target sequence
ataacgcccatattatccccg

SEQ ID NO: 296348 - DNA, 21 bp, Artificial sequence
  SiRNA target sequence
taacgcccatattatccccga

SEQ ID NO: 296349 - DNA, 21 bp, Artificial sequence
  SiRNA target sequence
aacgcccatattatccccgac

SEQ ID NO: 296350 - DNA, 21 bp, Artificial sequence
  SiRNA target sequence
acgcccatattatccccgact

SEQ ID NO: 296351 - DNA, 21 bp, Artificial sequence
  SiRNA target sequence
cgcccatattatccccgacta

SEQ ID NO: 296352 - DNA, 21 bp, Artificial sequence
  SiRNA target sequence
gcccatattatccccgactag

SEQ ID NO: 296353 - DNA, 21 bp, Artificial sequence
  SiRNA target sequence
cccatattatccccgactagc

SEQ ID NO: 296354 - DNA, 21 bp, Artificial sequence
  SiRNA target sequence
ccatattatccccgactagca

SEQ ID NO: 296355 - DNA, 21 bp, Artificial sequence
  SiRNA target sequence
catattatccccgactagcac

SEQ ID NO: 296356 - DNA, 21 bp, Artificial sequence
  SiRNA target sequence
atattatccccgactagcaca

SEQ ID NO: 296357 - DNA, 21 bp, Artificial sequence
  SiRNA target sequence
tattatccccgactagcacat

SEQ ID NO: 296358 - DNA, 21 bp, Artificial sequence
  SiRNA target sequence
attatccccgactagcacatc

SEQ ID NO: 296359 - DNA, 21 bp, Artificial sequence
  SiRNA target sequence
ttatccccgactagcacatct

SEQ ID NO: 296360 - DNA, 21 bp, Artificial sequence
  SiRNA target sequence
tatccccgactagcacatctg

SEQ ID NO: 296361 - DNA, 21 bp, Artificial sequence
  SiRNA target sequence
atccccgactagcacatctgc

SEQ ID NO: 296362 - DNA, 21 bp, Artificial sequence
  SiRNA target sequence
tccccgactagcacatctgct

SEQ ID NO: 296363 - DNA, 21 bp, Artificial sequence
  SiRNA target sequence
ccccgactagcacatctgcta

SEQ ID NO: 296364 - DNA, 21 bp, Artificial sequence
  SiRNA target sequence
cccgactagcacatctgctag

SEQ ID NO: 296365 - DNA, 21 bp, Artificial sequence
  SiRNA target sequence
ccgactagcacatctgctagt

SEQ ID NO: 296366 - DNA, 21 bp, Artificial sequence
  SiRNA target sequence
cgactagcacatctgctagtt

SEQ ID NO: 296367 - DNA, 21 bp, Artificial sequence
  SiRNA target sequence
gactagcacatctgctagttc

SEQ ID NO: 296368 - DNA, 21 bp, Artificial sequence
  SiRNA target sequence
actagcacatctgctagttca

SEQ ID NO: 296369 - DNA, 21 bp, Artificial sequence
  SiRNA target sequence
ctagcacatctgctagttcaa

SEQ ID NO: 296370 - DNA, 21 bp, Artificial sequence
  SiRNA target sequence
tagcacatctgctagttcaaa

SEQ ID NO: 296371 - DNA, 21 bp, Artificial sequence
  SiRNA target sequence
agcacatctgctagttcaaag

SEQ ID NO: 296372 - DNA, 21 bp, Artificial sequence
  SiRNA target sequence
gcacatctgctagttcaaagg

SEQ ID NO: 296373 - DNA, 21 bp, Artificial sequence
  SiRNA target sequence
cacatctgctagttcaaaggt

SEQ ID NO: 296374 - DNA, 21 bp, Artificial sequence
  SiRNA target sequence
acatctgctagttcaaaggtg

SEQ ID NO: 296375 - DNA, 21 bp, Artificial sequence
  SiRNA target sequence
catctgctagttcaaaggtgg

SEQ ID NO: 296376 - DNA, 21 bp, Artificial sequence
  SiRNA target sequence
atctgctagttcaaaggtgga

SEQ ID NO: 296377 - DNA, 21 bp, Artificial sequence
  SiRNA target sequence
tctgctagttcaaaggtggac

SEQ ID NO: 296378 - DNA, 21 bp, Artificial sequence
  SiRNA target sequence
ctgctagttcaaaggtggacc

SEQ ID NO: 296379 - DNA, 21 bp, Artificial sequence
  SiRNA target sequence
tgctagttcaaaggtggacct

SEQ ID NO: 296380 - DNA, 21 bp, Artificial sequence
  SiRNA target sequence
gctagttcaaaggtggacctt

SEQ ID NO: 296381 - DNA, 21 bp, Artificial sequence
  SiRNA target sequence
ctagttcaaaggtggaccttt

SEQ ID NO: 296382 - DNA, 21 bp, Artificial sequence
  SiRNA target sequence
tagttcaaaggtggacctttc

SEQ ID NO: 296383 - DNA, 21 bp, Artificial sequence
  SiRNA target sequence
agttcaaaggtggacctttca

SEQ ID NO: 296384 - DNA, 21 bp, Artificial sequence
  SiRNA target sequence
gttcaaaggtggacctttcag

SEQ ID NO: 296385 - DNA, 21 bp, Artificial sequence
  SiRNA target sequence
ttcaaaggtggacctttcagt

SEQ ID NO: 296386 - DNA, 21 bp, Artificial sequence
  SiRNA target sequence
tcaaaggtggacctttcagtt

SEQ ID NO: 296387 - DNA, 21 bp, Artificial sequence
  SiRNA target sequence
caaaggtggacctttcagttt

SEQ ID NO: 296388 - DNA, 21 bp, Artificial sequence
  SiRNA target sequence
aaaggtggacctttcagttta

SEQ ID NO: 296389 - DNA, 21 bp, Artificial sequence
  SiRNA target sequence
aaggtggacctttcagtttat

SEQ ID NO: 296390 - DNA, 21 bp, Artificial sequence
  SiRNA target sequence
aggtggacctttcagtttata

SEQ ID NO: 296391 - DNA, 21 bp, Artificial sequence
  SiRNA target sequence
ggtggacctttcagtttatat

SEQ ID NO: 296392 - DNA, 21 bp, Artificial sequence
  SiRNA target sequence
gtggacctttcagtttatatg

SEQ ID NO: 296393 - DNA, 21 bp, Artificial sequence
  SiRNA target sequence
tggacctttcagtttatatgt

SEQ ID NO: 296394 - DNA, 21 bp, Artificial sequence
  SiRNA target sequence
ggacctttcagtttatatgtg

SEQ ID NO: 296395 - DNA, 21 bp, Artificial sequence
  SiRNA target sequence
gacctttcagtttatatgtgg

SEQ ID NO: 296396 - DNA, 21 bp, Artificial sequence
  SiRNA target sequence
acctttcagtttatatgtggt

SEQ ID NO: 296397 - DNA, 21 bp, Artificial sequence
  SiRNA target sequence
cctttcagtttatatgtggtt

SEQ ID NO: 296398 - DNA, 21 bp, Artificial sequence
  SiRNA target sequence
ctttcagtttatatgtggttg

SEQ ID NO: 296399 - DNA, 21 bp, Artificial sequence
  SiRNA target sequence
tttcagtttatatgtggttgg

SEQ ID NO: 296400 - DNA, 21 bp, Artificial sequence
  SiRNA target sequence
ttcagtttatatgtggttgga

SEQ ID NO: 296401 - DNA, 21 bp, Artificial sequence
  SiRNA target sequence
tcagtttatatgtggttggat

SEQ ID NO: 296402 - DNA, 21 bp, Artificial sequence
  SiRNA target sequence
cagtttatatgtggttggata

SEQ ID NO: 296403 - DNA, 21 bp, Artificial sequence
  SiRNA target sequence
agtttatatgtggttggataa

SEQ ID NO: 296404 - DNA, 21 bp, Artificial sequence
  SiRNA target sequence
gtttatatgtggttggataat

SEQ ID NO: 296405 - DNA, 21 bp, Artificial sequence
  SiRNA target sequence
tttatatgtggttggataata

SEQ ID NO: 296406 - DNA, 21 bp, Artificial sequence
  SiRNA target sequence
ttatatgtggttggataatat

SEQ ID NO: 296407 - DNA, 21 bp, Artificial sequence
  SiRNA target sequence
tatatgtggttggataatatt

SEQ ID NO: 296408 - DNA, 21 bp, Artificial sequence
  SiRNA target sequence
atatgtggttggataatattt

SEQ ID NO: 296409 - DNA, 21 bp, Artificial sequence
  SiRNA target sequence
tatgtggttggataatatttc

SEQ ID NO: 296410 - DNA, 21 bp, Artificial sequence
  SiRNA target sequence
atgtggttggataatatttcc

SEQ ID NO: 296411 - DNA, 21 bp, Artificial sequence
  SiRNA target sequence
tgtggttggataatatttcct

SEQ ID NO: 296412 - DNA, 21 bp, Artificial sequence
  SiRNA target sequence
gtggttggataatatttcctt

SEQ ID NO: 296413 - DNA, 21 bp, Artificial sequence
  SiRNA target sequence
tggttggataatatttcctta

SEQ ID NO: 296414 - DNA, 21 bp, Artificial sequence
  SiRNA target sequence
ggttggataatatttccttag

SEQ ID NO: 296415 - DNA, 21 bp, Artificial sequence
  SiRNA target sequence
gttggataatatttccttagt

SEQ ID NO: 296416 - DNA, 21 bp, Artificial sequence
  SiRNA target sequence
ttggataatatttccttagtc

SEQ ID NO: 296417 - DNA, 21 bp, Artificial sequence
  SiRNA target sequence
tggataatatttccttagtca

SEQ ID NO: 296418 - DNA, 21 bp, Artificial sequence
  SiRNA target sequence
ggataatatttccttagtcat

SEQ ID NO: 296419 - DNA, 21 bp, Artificial sequence
  SiRNA target sequence
gataatatttccttagtcata

SEQ ID NO: 296420 - DNA, 21 bp, Artificial sequence
  SiRNA target sequence
ataatatttccttagtcatac

SEQ ID NO: 296421 - DNA, 21 bp, Artificial sequence
  SiRNA target sequence
taatatttccttagtcatacc

SEQ ID NO: 296422 - DNA, 21 bp, Artificial sequence
  SiRNA target sequence
aatatttccttagtcataccc

SEQ ID NO: 296423 - DNA, 21 bp, Artificial sequence
  SiRNA target sequence
atatttccttagtcataccca

SEQ ID NO: 296424 - DNA, 21 bp, Artificial sequence
  SiRNA target sequence
tatttccttagtcatacccac

SEQ ID NO: 296425 - DNA, 21 bp, Artificial sequence
  SiRNA target sequence
atttccttagtcatacccacg

SEQ ID NO: 296426 - DNA, 21 bp, Artificial sequence
  SiRNA target sequence
tttccttagtcatacccacgt

SEQ ID NO: 296427 - DNA, 21 bp, Artificial sequence
  SiRNA target sequence
ttccttagtcatacccacgta

SEQ ID NO: 296428 - DNA, 21 bp, Artificial sequence
  SiRNA target sequence
tccttagtcatacccacgtat

SEQ ID NO: 296429 - DNA, 21 bp, Artificial sequence
  SiRNA target sequence
ccttagtcatacccacgtatc

SEQ ID NO: 296430 - DNA, 21 bp, Artificial sequence
  SiRNA target sequence
cttagtcatacccacgtatcg

SEQ ID NO: 296431 - DNA, 21 bp, Artificial sequence
  SiRNA target sequence
ttagtcatacccacgtatcgc

SEQ ID NO: 296432 - DNA, 21 bp, Artificial sequence
  SiRNA target sequence
tagtcatacccacgtatcgcg

SEQ ID NO: 296433 - DNA, 21 bp, Artificial sequence
  SiRNA target sequence
agtcatacccacgtatcgcgt

SEQ ID NO: 296434 - DNA, 21 bp, Artificial sequence
  SiRNA target sequence
gtcatacccacgtatcgcgtt

SEQ ID NO: 296435 - DNA, 21 bp, Artificial sequence
  SiRNA target sequence
tcatacccacgtatcgcgtta

SEQ ID NO: 296436 - DNA, 21 bp, Artificial sequence
  SiRNA target sequence
catacccacgtatcgcgttaa

SEQ ID NO: 296437 - DNA, 21 bp, Artificial sequence
  SiRNA target sequence
atacccacgtatcgcgttaac

SEQ ID NO: 296438 - DNA, 21 bp, Artificial sequence
  SiRNA target sequence
tacccacgtatcgcgttaaca

SEQ ID NO: 296439 - DNA, 21 bp, Artificial sequence
  SiRNA target sequence
acccacgtatcgcgttaacac

SEQ ID NO: 296440 - DNA, 21 bp, Artificial sequence
  SiRNA target sequence
cccacgtatcgcgttaacacg

SEQ ID NO: 296441 - DNA, 21 bp, Artificial sequence
  SiRNA target sequence
ccacgtatcgcgttaacacga

SEQ ID NO: 296442 - DNA, 21 bp, Artificial sequence
  SiRNA target sequence
cacgtatcgcgttaacacgag

SEQ ID NO: 296443 - DNA, 21 bp, Artificial sequence
  SiRNA target sequence
acgtatcgcgttaacacgagc

SEQ ID NO: 296444 - DNA, 21 bp, Artificial sequence
  SiRNA target sequence
cgtatcgcgttaacacgagca

SEQ ID NO: 296445 - DNA, 21 bp, Artificial sequence
  SiRNA target sequence
gtatcgcgttaacacgagcat

SEQ ID NO: 296446 - DNA, 21 bp, Artificial sequence
  SiRNA target sequence
tatcgcgttaacacgagcatc

SEQ ID NO: 296447 - DNA, 21 bp, Artificial sequence
  SiRNA target sequence
atcgcgttaacacgagcatcg

SEQ ID NO: 296448 - DNA, 21 bp, Artificial sequence
  SiRNA target sequence
tcgcgttaacacgagcatcgt

SEQ ID NO: 296449 - DNA, 21 bp, Artificial sequence
  SiRNA target sequence
cgcgttaacacgagcatcgta

SEQ ID NO: 296450 - DNA, 21 bp, Artificial sequence
  SiRNA target sequence
gcgttaacacgagcatcgtac

SEQ ID NO: 296451 - DNA, 21 bp, Artificial sequence
  SiRNA target sequence
cgttaacacgagcatcgtacc

SEQ ID NO: 296452 - DNA, 21 bp, Artificial sequence
  SiRNA target sequence
gttaacacgagcatcgtacca

SEQ ID NO: 296453 - DNA, 21 bp, Artificial sequence
  SiRNA target sequence
ttaacacgagcatcgtaccaa

SEQ ID NO: 296454 - DNA, 21 bp, Artificial sequence
  SiRNA target sequence
taacacgagcatcgtaccaaa

SEQ ID NO: 296455 - DNA, 21 bp, Artificial sequence
  SiRNA target sequence
aacacgagcatcgtaccaaat

SEQ ID NO: 296456 - DNA, 21 bp, Artificial sequence
  SiRNA target sequence
acacgagcatcgtaccaaatg

SEQ ID NO: 296457 - DNA, 21 bp, Artificial sequence
  SiRNA target sequence
cacgagcatcgtaccaaatgt

SEQ ID NO: 296458 - DNA, 21 bp, Artificial sequence
  SiRNA target sequence
acgagcatcgtaccaaatgtg

SEQ ID NO: 296459 - DNA, 21 bp, Artificial sequence
  SiRNA target sequence
cgagcatcgtaccaaatgtgg

SEQ ID NO: 296460 - DNA, 21 bp, Artificial sequence
  SiRNA target sequence
gagcatcgtaccaaatgtggg

SEQ ID NO: 296461 - DNA, 21 bp, Artificial sequence
  SiRNA target sequence
agcatcgtaccaaatgtgggg

SEQ ID NO: 296462 - DNA, 21 bp, Artificial sequence
  SiRNA target sequence
gcatcgtaccaaatgtgggga

SEQ ID NO: 296463 - DNA, 21 bp, Artificial sequence
  SiRNA target sequence
catcgtaccaaatgtggggac

SEQ ID NO: 296464 - DNA, 21 bp, Artificial sequence
  SiRNA target sequence
atcgtaccaaatgtggggact

SEQ ID NO: 296465 - DNA, 21 bp, Artificial sequence
  SiRNA target sequence
tcgtaccaaatgtggggactg

SEQ ID NO: 296466 - DNA, 21 bp, Artificial sequence
  SiRNA target sequence
cgtaccaaatgtggggactgt

SEQ ID NO: 296467 - DNA, 21 bp, Artificial sequence
  SiRNA target sequence
gtaccaaatgtggggactgtt

SEQ ID NO: 296468 - DNA, 21 bp, Artificial sequence
  SiRNA target sequence
taccaaatgtggggactgttg

SEQ ID NO: 296469 - DNA, 21 bp, Artificial sequence
  SiRNA target sequence
accaaatgtggggactgttgt

SEQ ID NO: 296470 - DNA, 21 bp, Artificial sequence
  SiRNA target sequence
ccaaatgtggggactgttgtt

SEQ ID NO: 296471 - DNA, 21 bp, Artificial sequence
  SiRNA target sequence
caaatgtggggactgttgttc

SEQ ID NO: 296472 - DNA, 21 bp, Artificial sequence
  SiRNA target sequence
aaatgtggggactgttgttca

SEQ ID NO: 296473 - DNA, 21 bp, Artificial sequence
  SiRNA target sequence
aatgtggggactgttgttcag

SEQ ID NO: 296474 - DNA, 21 bp, Artificial sequence
  SiRNA target sequence
atgtggggactgttgttcaga

SEQ ID NO: 296475 - DNA, 21 bp, Artificial sequence
  SiRNA target sequence
tgtggggactgttgttcagac

SEQ ID NO: 296476 - DNA, 21 bp, Artificial sequence
  SiRNA target sequence
gtggggactgttgttcagaca

SEQ ID NO: 296477 - DNA, 21 bp, Artificial sequence
  SiRNA target sequence
tggggactgttgttcagacag

SEQ ID NO: 296478 - DNA, 21 bp, Artificial sequence
  SiRNA target sequence
ggggactgttgttcagacagt

SEQ ID NO: 296479 - DNA, 21 bp, Artificial sequence
  SiRNA target sequence
gggactgttgttcagacagta

SEQ ID NO: 296480 - DNA, 21 bp, Artificial sequence
  SiRNA target sequence
ggactgttgttcagacagtac

SEQ ID NO: 296481 - DNA, 21 bp, Artificial sequence
  SiRNA target sequence
gactgttgttcagacagtaca

SEQ ID NO: 296482 - DNA, 21 bp, Artificial sequence
  SiRNA target sequence
actgttgttcagacagtacaa

SEQ ID NO: 296483 - DNA, 21 bp, Artificial sequence
  SiRNA target sequence
ctgttgttcagacagtacaaa

SEQ ID NO: 296484 - DNA, 21 bp, Artificial sequence
  SiRNA target sequence
tgttgttcagacagtacaaaa

SEQ ID NO: 296485 - DNA, 21 bp, Artificial sequence
  SiRNA target sequence
gttgttcagacagtacaaaat

SEQ ID NO: 296486 - DNA, 21 bp, Artificial sequence
  SiRNA target sequence
ttgttcagacagtacaaaata

SEQ ID NO: 296487 - DNA, 21 bp, Artificial sequence
  SiRNA target sequence
tgttcagacagtacaaaatat

SEQ ID NO: 296488 - DNA, 21 bp, Artificial sequence
  SiRNA target sequence
gttcagacagtacaaaatatg

SEQ ID NO: 296489 - DNA, 21 bp, Artificial sequence
  SiRNA target sequence
ttcagacagtacaaaatatga

SEQ ID NO: 296490 - DNA, 21 bp, Artificial sequence
  SiRNA target sequence
tcagacagtacaaaatatgac

SEQ ID NO: 296491 - DNA, 21 bp, Artificial sequence
  SiRNA target sequence
cagacagtacaaaatatgact

SEQ ID NO: 296492 - DNA, 21 bp, Artificial sequence
  SiRNA target sequence
agacagtacaaaatatgacta

SEQ ID NO: 296493 - DNA, 21 bp, Artificial sequence
  SiRNA target sequence
gacagtacaaaatatgactac

SEQ ID NO: 296494 - DNA, 21 bp, Artificial sequence
  SiRNA target sequence
acagtacaaaatatgactaca

SEQ ID NO: 296495 - DNA, 21 bp, Artificial sequence
  SiRNA target sequence
cagtacaaaatatgactacac

SEQ ID NO: 296496 - DNA, 21 bp, Artificial sequence
  SiRNA target sequence
agtacaaaatatgactacacg

SEQ ID NO: 296497 - DNA, 21 bp, Artificial sequence
  SiRNA target sequence
gtacaaaatatgactacacga

SEQ ID NO: 296498 - DNA, 21 bp, Artificial sequence
  SiRNA target sequence
tacaaaatatgactacacgag

SEQ ID NO: 296499 - DNA, 21 bp, Artificial sequence
  SiRNA target sequence
acaaaatatgactacacgaga

SEQ ID NO: 296500 - DNA, 21 bp, Artificial sequence
  SiRNA target sequence
caaaatatgactacacgagac

SEQ ID NO: 296501 - DNA, 21 bp, Artificial sequence
  SiRNA target sequence
aaaatatgactacacgagaca

SEQ ID NO: 296502 - DNA, 21 bp, Artificial sequence
  SiRNA target sequence
aaatatgactacacgagacag

SEQ ID NO: 296503 - DNA, 21 bp, Artificial sequence
  SiRNA target sequence
aatatgactacacgagacagt

SEQ ID NO: 296504 - DNA, 21 bp, Artificial sequence
  SiRNA target sequence
atatgactacacgagacagtg

SEQ ID NO: 296505 - DNA, 21 bp, Artificial sequence
  SiRNA target sequence
tatgactacacgagacagtga

SEQ ID NO: 296506 - DNA, 21 bp, Artificial sequence
  SiRNA target sequence
atgactacacgagacagtgaa

SEQ ID NO: 296507 - DNA, 21 bp, Artificial sequence
  SiRNA target sequence
tgactacacgagacagtgaaa

SEQ ID NO: 296508 - DNA, 21 bp, Artificial sequence
  SiRNA target sequence
gactacacgagacagtgaaac

SEQ ID NO: 296509 - DNA, 21 bp, Artificial sequence
  SiRNA target sequence
actacacgagacagtgaaaca

SEQ ID NO: 296510 - DNA, 21 bp, Artificial sequence
  SiRNA target sequence
ctacacgagacagtgaaacaa

SEQ ID NO: 296511 - DNA, 21 bp, Artificial sequence
  SiRNA target sequence
tacacgagacagtgaaacaat

SEQ ID NO: 296512 - DNA, 21 bp, Artificial sequence
  SiRNA target sequence
acacgagacagtgaaacaatt

SEQ ID NO: 296513 - DNA, 21 bp, Artificial sequence
  SiRNA target sequence
cacgagacagtgaaacaatta

SEQ ID NO: 296514 - DNA, 21 bp, Artificial sequence
  SiRNA target sequence
acgagacagtgaaacaattag

SEQ ID NO: 296515 - DNA, 21 bp, Artificial sequence
  SiRNA target sequence
cgagacagtgaaacaattagg

SEQ ID NO: 296516 - DNA, 21 bp, Artificial sequence
  SiRNA target sequence
gagacagtgaaacaattagga

SEQ ID NO: 296517 - DNA, 21 bp, Artificial sequence
  SiRNA target sequence
agacagtgaaacaattaggaa

SEQ ID NO: 296518 - DNA, 21 bp, Artificial sequence
  SiRNA target sequence
gacagtgaaacaattaggaaa

SEQ ID NO: 296519 - DNA, 21 bp, Artificial sequence
  SiRNA target sequence
acagtgaaacaattaggaaag

SEQ ID NO: 296520 - DNA, 21 bp, Artificial sequence
  SiRNA target sequence
cagtgaaacaattaggaaagc

SEQ ID NO: 296521 - DNA, 21 bp, Artificial sequence
  SiRNA target sequence
agtgaaacaattaggaaagca

SEQ ID NO: 296522 - DNA, 21 bp, Artificial sequence
  SiRNA target sequence
gtgaaacaattaggaaagcaa

SEQ ID NO: 296523 - DNA, 21 bp, Artificial sequence
  SiRNA target sequence
tgaaacaattaggaaagcaat

SEQ ID NO: 296524 - DNA, 21 bp, Artificial sequence
  SiRNA target sequence
gaaacaattaggaaagcaatg

SEQ ID NO: 296525 - DNA, 21 bp, Artificial sequence
  SiRNA target sequence
aaacaattaggaaagcaatgg

SEQ ID NO: 296526 - DNA, 21 bp, Artificial sequence
  SiRNA target sequence
aacaattaggaaagcaatggt

SEQ ID NO: 296527 - DNA, 21 bp, Artificial sequence
  SiRNA target sequence
acaattaggaaagcaatggtt

SEQ ID NO: 296528 - DNA, 21 bp, Artificial sequence
  SiRNA target sequence
caattaggaaagcaatggttg

SEQ ID NO: 296529 - DNA, 21 bp, Artificial sequence
  SiRNA target sequence
aattaggaaagcaatggttgc

SEQ ID NO: 296530 - DNA, 21 bp, Artificial sequence
  SiRNA target sequence
attaggaaagcaatggttgca

SEQ ID NO: 296531 - DNA, 21 bp, Artificial sequence
  SiRNA target sequence
ttaggaaagcaatggttgcat

SEQ ID NO: 296532 - DNA, 21 bp, Artificial sequence
  SiRNA target sequence
taggaaagcaatggttgcatt

SEQ ID NO: 296533 - DNA, 21 bp, Artificial sequence
  SiRNA target sequence
aggaaagcaatggttgcatta

SEQ ID NO: 296534 - DNA, 21 bp, Artificial sequence
  SiRNA target sequence
ggaaagcaatggttgcattaa

SEQ ID NO: 296535 - DNA, 21 bp, Artificial sequence
  SiRNA target sequence
gaaagcaatggttgcattaag

SEQ ID NO: 296536 - DNA, 21 bp, Artificial sequence
  SiRNA target sequence
aaagcaatggttgcattaagg

SEQ ID NO: 296537 - DNA, 21 bp, Artificial sequence
  SiRNA target sequence
aagcaatggttgcattaagga

SEQ ID NO: 296538 - DNA, 21 bp, Artificial sequence
  SiRNA target sequence
agcaatggttgcattaaggaa

SEQ ID NO: 296539 - DNA, 21 bp, Artificial sequence
  SiRNA target sequence
gcaatggttgcattaaggaaa

SEQ ID NO: 296540 - DNA, 21 bp, Artificial sequence
  SiRNA target sequence
caatggttgcattaaggaaaa

SEQ ID NO: 296541 - DNA, 21 bp, Artificial sequence
  SiRNA target sequence
aatggttgcattaaggaaaaa

SEQ ID NO: 296542 - DNA, 21 bp, Artificial sequence
  SiRNA target sequence
atggttgcattaaggaaaaat

SEQ ID NO: 296543 - DNA, 21 bp, Artificial sequence
  SiRNA target sequence
tggttgcattaaggaaaaata

SEQ ID NO: 296544 - DNA, 21 bp, Artificial sequence
  SiRNA target sequence
ggttgcattaaggaaaaataa

SEQ ID NO: 296545 - DNA, 21 bp, Artificial sequence
  SiRNA target sequence
gttgcattaaggaaaaataat

SEQ ID NO: 296546 - DNA, 21 bp, Artificial sequence
  SiRNA target sequence
ttgcattaaggaaaaataata

SEQ ID NO: 296547 - DNA, 21 bp, Artificial sequence
  SiRNA target sequence
tgcattaaggaaaaataataa

SEQ ID NO: 296548 - DNA, 21 bp, Artificial sequence
  SiRNA target sequence
gcattaaggaaaaataataaa

SEQ ID NO: 296549 - DNA, 21 bp, Artificial sequence
  SiRNA target sequence
cattaaggaaaaataataaat

SEQ ID NO: 296550 - DNA, 21 bp, Artificial sequence
  SiRNA target sequence
attaaggaaaaataataaatc

SEQ ID NO: 296551 - DNA, 21 bp, Artificial sequence
  SiRNA target sequence
ttaaggaaaaataataaatca

SEQ ID NO: 296552 - DNA, 21 bp, Artificial sequence
  SiRNA target sequence
taaggaaaaataataaatcaa

SEQ ID NO: 296553 - DNA, 21 bp, Artificial sequence
  SiRNA target sequence
aaggaaaaataataaatcaac

SEQ ID NO: 296554 - DNA, 21 bp, Artificial sequence
  SiRNA target sequence
aggaaaaataataaatcaact

SEQ ID NO: 296555 - DNA, 21 bp, Artificial sequence
  SiRNA target sequence
ggaaaaataataaatcaactt

SEQ ID NO: 296556 - DNA, 21 bp, Artificial sequence
  SiRNA target sequence
gaaaaataataaatcaactta

SEQ ID NO: 296557 - DNA, 21 bp, Artificial sequence
  SiRNA target sequence
aaaaataataaatcaacttac

SEQ ID NO: 296558 - DNA, 21 bp, Artificial sequence
  SiRNA target sequence
aaaataataaatcaacttacg

SEQ ID NO: 296559 - DNA, 21 bp, Artificial sequence
  SiRNA target sequence
aaataataaatcaacttacga

SEQ ID NO: 296560 - DNA, 21 bp, Artificial sequence
  SiRNA target sequence
aataataaatcaacttacgac

SEQ ID NO: 296561 - DNA, 21 bp, Artificial sequence
  SiRNA target sequence
ataataaatcaacttacgact

SEQ ID NO: 296562 - DNA, 21 bp, Artificial sequence
  SiRNA target sequence
taataaatcaacttacgacta

SEQ ID NO: 296563 - DNA, 21 bp, Artificial sequence
  SiRNA target sequence
aataaatcaacttacgactat

SEQ ID NO: 296564 - DNA, 21 bp, Artificial sequence
  SiRNA target sequence
ataaatcaacttacgactata

SEQ ID NO: 296565 - DNA, 21 bp, Artificial sequence
  SiRNA target sequence
taaatcaacttacgactatat

SEQ ID NO: 296566 - DNA, 21 bp, Artificial sequence
  SiRNA target sequence
aaatcaacttacgactatata

SEQ ID NO: 296567 - DNA, 21 bp, Artificial sequence
  SiRNA target sequence
aatcaacttacgactatatag

SEQ ID NO: 296568 - DNA, 21 bp, Artificial sequence
  SiRNA target sequence
atcaacttacgactatatagt

SEQ ID NO: 296569 - DNA, 21 bp, Artificial sequence
  SiRNA target sequence
tcaacttacgactatatagtg

SEQ ID NO: 296570 - DNA, 21 bp, Artificial sequence
  SiRNA target sequence
caacttacgactatatagtgc

SEQ ID NO: 296571 - DNA, 21 bp, Artificial sequence
  SiRNA target sequence
aacttacgactatatagtgca

SEQ ID NO: 296572 - DNA, 21 bp, Artificial sequence
  SiRNA target sequence
acttacgactatatagtgcaa

SEQ ID NO: 296573 - DNA, 21 bp, Artificial sequence
  SiRNA target sequence
cttacgactatatagtgcaag

SEQ ID NO: 296574 - DNA, 21 bp, Artificial sequence
  SiRNA target sequence
ttacgactatatagtgcaagc

SEQ ID NO: 296575 - DNA, 21 bp, Artificial sequence
  SiRNA target sequence
tacgactatatagtgcaagct

SEQ ID NO: 296576 - DNA, 21 bp, Artificial sequence
  SiRNA target sequence
acgactatatagtgcaagctt

SEQ ID NO: 296577 - DNA, 21 bp, Artificial sequence
  SiRNA target sequence
cgactatatagtgcaagcttt

SEQ ID NO: 296578 - DNA, 21 bp, Artificial sequence
  SiRNA target sequence
gactatatagtgcaagcttta

SEQ ID NO: 296579 - DNA, 21 bp, Artificial sequence
  SiRNA target sequence
actatatagtgcaagctttat

SEQ ID NO: 296580 - DNA, 21 bp, Artificial sequence
  SiRNA target sequence
ctatatagtgcaagctttatc

SEQ ID NO: 296581 - DNA, 21 bp, Artificial sequence
  SiRNA target sequence
tatatagtgcaagctttatct

SEQ ID NO: 296582 - DNA, 21 bp, Artificial sequence
  SiRNA target sequence
atatagtgcaagctttatctt

SEQ ID NO: 296583 - DNA, 21 bp, Artificial sequence
  SiRNA target sequence
tatagtgcaagctttatcttc

SEQ ID NO: 296584 - DNA, 21 bp, Artificial sequence
  SiRNA target sequence
atagtgcaagctttatcttct

SEQ ID NO: 296585 - DNA, 21 bp, Artificial sequence
  SiRNA target sequence
tagtgcaagctttatcttctg

SEQ ID NO: 296586 - DNA, 21 bp, Artificial sequence
  SiRNA target sequence
agtgcaagctttatcttctgc

SEQ ID NO: 296587 - DNA, 21 bp, Artificial sequence
  SiRNA target sequence
gtgcaagctttatcttctgca

SEQ ID NO: 296588 - DNA, 21 bp, Artificial sequence
  SiRNA target sequence
tgcaagctttatcttctgcag

SEQ ID NO: 296589 - DNA, 21 bp, Artificial sequence
  SiRNA target sequence
gcaagctttatcttctgcagt

SEQ ID NO: 296590 - DNA, 21 bp, Artificial sequence
  SiRNA target sequence
caagctttatcttctgcagtt

SEQ ID NO: 296591 - DNA, 21 bp, Artificial sequence
  SiRNA target sequence
aagctttatcttctgcagttc

SEQ ID NO: 296592 - DNA, 21 bp, Artificial sequence
  SiRNA target sequence
agctttatcttctgcagttcc

SEQ ID NO: 296593 - DNA, 21 bp, Artificial sequence
  SiRNA target sequence
gctttatcttctgcagttcca

SEQ ID NO: 296594 - DNA, 21 bp, Artificial sequence
  SiRNA target sequence
ctttatcttctgcagttccag

SEQ ID NO: 296595 - DNA, 21 bp, Artificial sequence
  SiRNA target sequence
tttatcttctgcagttccaga

SEQ ID NO: 296596 - DNA, 21 bp, Artificial sequence
  SiRNA target sequence
ttatcttctgcagttccagaa

SEQ ID NO: 296597 - DNA, 21 bp, Artificial sequence
  SiRNA target sequence
tatcttctgcagttccagaag

SEQ ID NO: 296598 - DNA, 21 bp, Artificial sequence
  SiRNA target sequence
atcttctgcagttccagaagt

SEQ ID NO: 296599 - DNA, 21 bp, Artificial sequence
  SiRNA target sequence
tcttctgcagttccagaagtt

SEQ ID NO: 296600 - DNA, 21 bp, Artificial sequence
  SiRNA target sequence
cttctgcagttccagaagtta

SEQ ID NO: 296601 - DNA, 21 bp, Artificial sequence
  SiRNA target sequence
ttctgcagttccagaagttaa

SEQ ID NO: 296602 - DNA, 21 bp, Artificial sequence
  SiRNA target sequence
tctgcagttccagaagttaag

SEQ ID NO: 296603 - DNA, 21 bp, Artificial sequence
  SiRNA target sequence
ctgcagttccagaagttaaga

SEQ ID NO: 296604 - DNA, 21 bp, Artificial sequence
  SiRNA target sequence
tgcagttccagaagttaagaa

SEQ ID NO: 296605 - DNA, 21 bp, Artificial sequence
  SiRNA target sequence
gcagttccagaagttaagaat

SEQ ID NO: 296606 - DNA, 21 bp, Artificial sequence
  SiRNA target sequence
cagttccagaagttaagaatg

SEQ ID NO: 296607 - DNA, 21 bp, Artificial sequence
  SiRNA target sequence
agttccagaagttaagaatgt

SEQ ID NO: 296608 - DNA, 21 bp, Artificial sequence
  SiRNA target sequence
gttccagaagttaagaatgta

SEQ ID NO: 296609 - DNA, 21 bp, Artificial sequence
  SiRNA target sequence
ttccagaagttaagaatgtaa

SEQ ID NO: 296610 - DNA, 21 bp, Artificial sequence
  SiRNA target sequence
tccagaagttaagaatgtaac

SEQ ID NO: 296611 - DNA, 21 bp, Artificial sequence
  SiRNA target sequence
ccagaagttaagaatgtaact

SEQ ID NO: 296612 - DNA, 21 bp, Artificial sequence
  SiRNA target sequence
cagaagttaagaatgtaacta

SEQ ID NO: 296613 - DNA, 21 bp, Artificial sequence
  SiRNA target sequence
agaagttaagaatgtaactat

SEQ ID NO: 296614 - DNA, 21 bp, Artificial sequence
  SiRNA target sequence
gaagttaagaatgtaactatg

SEQ ID NO: 296615 - DNA, 21 bp, Artificial sequence
  SiRNA target sequence
aagttaagaatgtaactatgc

SEQ ID NO: 296616 - DNA, 21 bp, Artificial sequence
  SiRNA target sequence
agttaagaatgtaactatgca

SEQ ID NO: 296617 - DNA, 21 bp, Artificial sequence
  SiRNA target sequence
gttaagaatgtaactatgcag

SEQ ID NO: 296618 - DNA, 21 bp, Artificial sequence
  SiRNA target sequence
ttaagaatgtaactatgcaga

SEQ ID NO: 296619 - DNA, 21 bp, Artificial sequence
  SiRNA target sequence
taagaatgtaactatgcagat

SEQ ID NO: 296620 - DNA, 21 bp, Artificial sequence
  SiRNA target sequence
aagaatgtaactatgcagatc

SEQ ID NO: 296621 - DNA, 21 bp, Artificial sequence
  SiRNA target sequence
agaatgtaactatgcagatca

SEQ ID NO: 296622 - DNA, 21 bp, Artificial sequence
  SiRNA target sequence
gaatgtaactatgcagatcaa

SEQ ID NO: 296623 - DNA, 21 bp, Artificial sequence
  SiRNA target sequence
aatgtaactatgcagatcaat

SEQ ID NO: 296624 - DNA, 21 bp, Artificial sequence
  SiRNA target sequence
atgtaactatgcagatcaatt

SEQ ID NO: 296625 - DNA, 21 bp, Artificial sequence
  SiRNA target sequence
tgtaactatgcagatcaattc

SEQ ID NO: 296626 - DNA, 21 bp, Artificial sequence
  SiRNA target sequence
gtaactatgcagatcaattcc

SEQ ID NO: 296627 - DNA, 21 bp, Artificial sequence
  SiRNA target sequence
taactatgcagatcaattcca

SEQ ID NO: 296628 - DNA, 21 bp, Artificial sequence
  SiRNA target sequence
aactatgcagatcaattccaa

SEQ ID NO: 296629 - DNA, 21 bp, Artificial sequence
  SiRNA target sequence
actatgcagatcaattccaag

SEQ ID NO: 296630 - DNA, 21 bp, Artificial sequence
  SiRNA target sequence
ctatgcagatcaattccaaga

SEQ ID NO: 296631 - DNA, 21 bp, Artificial sequence
  SiRNA target sequence
tatgcagatcaattccaagaa

SEQ ID NO: 296632 - DNA, 21 bp, Artificial sequence
  SiRNA target sequence
atgcagatcaattccaagaaa

SEQ ID NO: 296633 - DNA, 21 bp, Artificial sequence
  SiRNA target sequence
tgcagatcaattccaagaaaa

SEQ ID NO: 296634 - DNA, 21 bp, Artificial sequence
  SiRNA target sequence
gcagatcaattccaagaaaaa

SEQ ID NO: 296635 - DNA, 21 bp, Artificial sequence
  SiRNA target sequence
cagatcaattccaagaaaaat

SEQ ID NO: 296636 - DNA, 21 bp, Artificial sequence
  SiRNA target sequence
agatcaattccaagaaaaata

SEQ ID NO: 296637 - DNA, 21 bp, Artificial sequence
  SiRNA target sequence
gatcaattccaagaaaaataa

SEQ ID NO: 296638 - DNA, 21 bp, Artificial sequence
  SiRNA target sequence
atcaattccaagaaaaataat

SEQ ID NO: 296639 - DNA, 21 bp, Artificial sequence
  SiRNA target sequence
tcaattccaagaaaaataatt

SEQ ID NO: 296640 - DNA, 21 bp, Artificial sequence
  SiRNA target sequence
caattccaagaaaaataattc

SEQ ID NO: 296641 - DNA, 21 bp, Artificial sequence
  SiRNA target sequence
aattccaagaaaaataattcc

SEQ ID NO: 296642 - DNA, 21 bp, Artificial sequence
  SiRNA target sequence
attccaagaaaaataattcca

SEQ ID NO: 296643 - DNA, 21 bp, Artificial sequence
  SiRNA target sequence
ttccaagaaaaataattccaa

SEQ ID NO: 296644 - DNA, 21 bp, Artificial sequence
  SiRNA target sequence
tccaagaaaaataattccaat

SEQ ID NO: 296645 - DNA, 21 bp, Artificial sequence
  SiRNA target sequence
ccaagaaaaataattccaata

SEQ ID NO: 296646 - DNA, 21 bp, Artificial sequence
  SiRNA target sequence
caagaaaaataattccaataa

SEQ ID NO: 296647 - DNA, 21 bp, Artificial sequence
  SiRNA target sequence
aagaaaaataattccaataaa

SEQ ID NO: 296648 - DNA, 21 bp, Artificial sequence
  SiRNA target sequence
agaaaaataattccaataaaa

SEQ ID NO: 296649 - DNA, 21 bp, Artificial sequence
  SiRNA target sequence
gaaaaataattccaataaaat

SEQ ID NO: 296650 - DNA, 21 bp, Artificial sequence
  SiRNA target sequence
aaaaataattccaataaaatg

SEQ ID NO: 296651 - DNA, 21 bp, Artificial sequence
  SiRNA target sequence
aaaataattccaataaaatgg

SEQ ID NO: 296652 - DNA, 21 bp, Artificial sequence
  SiRNA target sequence
aaataattccaataaaatggc

SEQ ID NO: 296653 - DNA, 21 bp, Artificial sequence
  SiRNA target sequence
aataattccaataaaatggca

SEQ ID NO: 296654 - DNA, 21 bp, Artificial sequence
  SiRNA target sequence
ataattccaataaaatggcaa

SEQ ID NO: 296655 - DNA, 21 bp, Artificial sequence
  SiRNA target sequence
taattccaataaaatggcaac

SEQ ID NO: 296656 - DNA, 21 bp, Artificial sequence
  SiRNA target sequence
aattccaataaaatggcaaca

SEQ ID NO: 296657 - DNA, 21 bp, Artificial sequence
  SiRNA target sequence
attccaataaaatggcaacac

SEQ ID NO: 296658 - DNA, 21 bp, Artificial sequence
  SiRNA target sequence
ttccaataaaatggcaacacc

SEQ ID NO: 296659 - DNA, 21 bp, Artificial sequence
  SiRNA target sequence
tccaataaaatggcaacacct

SEQ ID NO: 296660 - DNA, 21 bp, Artificial sequence
  SiRNA target sequence
ccaataaaatggcaacacctg

SEQ ID NO: 296661 - DNA, 21 bp, Artificial sequence
  SiRNA target sequence
caataaaatggcaacacctgt

SEQ ID NO: 296662 - DNA, 21 bp, Artificial sequence
  SiRNA target sequence
aataaaatggcaacacctgtt

SEQ ID NO: 296663 - DNA, 21 bp, Artificial sequence
  SiRNA target sequence
ataaaatggcaacacctgtta

SEQ ID NO: 296664 - DNA, 21 bp, Artificial sequence
  SiRNA target sequence
taaaatggcaacacctgttaa

SEQ ID NO: 296665 - DNA, 21 bp, Artificial sequence
  SiRNA target sequence
aaaatggcaacacctgttaag

SEQ ID NO: 296666 - DNA, 21 bp, Artificial sequence
  SiRNA target sequence
aaatggcaacacctgttaagg

SEQ ID NO: 296667 - DNA, 21 bp, Artificial sequence
  SiRNA target sequence
aatggcaacacctgttaagga

SEQ ID NO: 296668 - DNA, 21 bp, Artificial sequence
  SiRNA target sequence
atggcaacacctgttaaggaa

SEQ ID NO: 296669 - DNA, 21 bp, Artificial sequence
  SiRNA target sequence
tggcaacacctgttaaggaaa

SEQ ID NO: 296670 - DNA, 21 bp, Artificial sequence
  SiRNA target sequence
ggcaacacctgttaaggaaaa

SEQ ID NO: 296671 - DNA, 21 bp, Artificial sequence
  SiRNA target sequence
gcaacacctgttaaggaaaaa

SEQ ID NO: 296672 - DNA, 21 bp, Artificial sequence
  SiRNA target sequence
caacacctgttaaggaaaaaa

SEQ ID NO: 296673 - DNA, 21 bp, Artificial sequence
  SiRNA target sequence
aacacctgttaaggaaaaaac

SEQ ID NO: 296674 - DNA, 21 bp, Artificial sequence
  SiRNA target sequence
acacctgttaaggaaaaaaca

SEQ ID NO: 296675 - DNA, 21 bp, Artificial sequence
  SiRNA target sequence
cacctgttaaggaaaaaacaa

SEQ ID NO: 296676 - DNA, 21 bp, Artificial sequence
  SiRNA target sequence
acctgttaaggaaaaaacaaa

SEQ ID NO: 296677 - DNA, 21 bp, Artificial sequence
  SiRNA target sequence
cctgttaaggaaaaaacaaaa

SEQ ID NO: 296678 - DNA, 21 bp, Artificial sequence
  SiRNA target sequence
ctgttaaggaaaaaacaaaaa

SEQ ID NO: 296679 - DNA, 21 bp, Artificial sequence
  SiRNA target sequence
tgttaaggaaaaaacaaaaaa

SEQ ID NO: 296680 - DNA, 21 bp, Artificial sequence
  SiRNA target sequence
gttaaggaaaaaacaaaaaat

SEQ ID NO: 296681 - DNA, 21 bp, Artificial sequence
  SiRNA target sequence
ttaaggaaaaaacaaaaaata

SEQ ID NO: 296682 - DNA, 21 bp, Artificial sequence
  SiRNA target sequence
taaggaaaaaacaaaaaatat

SEQ ID NO: 296683 - DNA, 21 bp, Artificial sequence
  SiRNA target sequence
aaggaaaaaacaaaaaatata

SEQ ID NO: 296684 - DNA, 21 bp, Artificial sequence
  SiRNA target sequence
aggaaaaaacaaaaaatatac

SEQ ID NO: 296685 - DNA, 21 bp, Artificial sequence
  SiRNA target sequence
ggaaaaaacaaaaaatatacc

SEQ ID NO: 296686 - DNA, 21 bp, Artificial sequence
  SiRNA target sequence
gaaaaaacaaaaaatataccc

SEQ ID NO: 296687 - DNA, 21 bp, Artificial sequence
  SiRNA target sequence
aaaaaacaaaaaatataccca

SEQ ID NO: 296688 - DNA, 21 bp, Artificial sequence
  SiRNA target sequence
aaaaacaaaaaatatacccaa

SEQ ID NO: 296689 - DNA, 21 bp, Artificial sequence
  SiRNA target sequence
aaaacaaaaaatatacccaaa

SEQ ID NO: 296690 - DNA, 21 bp, Artificial sequence
  SiRNA target sequence
aaacaaaaaatatacccaaac

SEQ ID NO: 296691 - DNA, 21 bp, Artificial sequence
  SiRNA target sequence
aacaaaaaatatacccaaacc

SEQ ID NO: 296692 - DNA, 21 bp, Artificial sequence
  SiRNA target sequence
acaaaaaatatacccaaacca

SEQ ID NO: 296693 - DNA, 21 bp, Artificial sequence
  SiRNA target sequence
caaaaaatatacccaaaccaa

SEQ ID NO: 296694 - DNA, 21 bp, Artificial sequence
  SiRNA target sequence
aaaaaatatacccaaaccaaa

SEQ ID NO: 296695 - DNA, 21 bp, Artificial sequence
  SiRNA target sequence
aaaaatatacccaaaccaaag

SEQ ID NO: 296696 - DNA, 21 bp, Artificial sequence
  SiRNA target sequence
aaaatatacccaaaccaaaga

SEQ ID NO: 296697 - DNA, 21 bp, Artificial sequence
  SiRNA target sequence
aaatatacccaaaccaaagac

SEQ ID NO: 296698 - DNA, 21 bp, Artificial sequence
  SiRNA target sequence
aatatacccaaaccaaagact

SEQ ID NO: 296699 - DNA, 21 bp, Artificial sequence
  SiRNA target sequence
atatacccaaaccaaagactg

SEQ ID NO: 296700 - DNA, 21 bp, Artificial sequence
  SiRNA target sequence
tatacccaaaccaaagactga

SEQ ID NO: 296701 - DNA, 21 bp, Artificial sequence
  SiRNA target sequence
atacccaaaccaaagactgaa

SEQ ID NO: 296702 - DNA, 21 bp, Artificial sequence
  SiRNA target sequence
tacccaaaccaaagactgaaa

SEQ ID NO: 296703 - DNA, 21 bp, Artificial sequence
  SiRNA target sequence
acccaaaccaaagactgaaaa

SEQ ID NO: 296704 - DNA, 21 bp, Artificial sequence
  SiRNA target sequence
cccaaaccaaagactgaaaat

SEQ ID NO: 296705 - DNA, 21 bp, Artificial sequence
  SiRNA target sequence
ccaaaccaaagactgaaaatc

SEQ ID NO: 296706 - DNA, 21 bp, Artificial sequence
  SiRNA target sequence
caaaccaaagactgaaaatcc

SEQ ID NO: 296707 - DNA, 21 bp, Artificial sequence
  SiRNA target sequence
aaaccaaagactgaaaatccg

SEQ ID NO: 296708 - DNA, 21 bp, Artificial sequence
  SiRNA target sequence
aaccaaagactgaaaatccga

SEQ ID NO: 296709 - DNA, 21 bp, Artificial sequence
  SiRNA target sequence
accaaagactgaaaatccgaa

SEQ ID NO: 296710 - DNA, 21 bp, Artificial sequence
  SiRNA target sequence
ccaaagactgaaaatccgaag

SEQ ID NO: 296711 - DNA, 21 bp, Artificial sequence
  SiRNA target sequence
caaagactgaaaatccgaaga

SEQ ID NO: 296712 - DNA, 21 bp, Artificial sequence
  SiRNA target sequence
aaagactgaaaatccgaagat

SEQ ID NO: 296713 - DNA, 21 bp, Artificial sequence
  SiRNA target sequence
aagactgaaaatccgaagatt

SEQ ID NO: 296714 - DNA, 21 bp, Artificial sequence
  SiRNA target sequence
agactgaaaatccgaagattg

SEQ ID NO: 296715 - DNA, 21 bp, Artificial sequence
  SiRNA target sequence
gactgaaaatccgaagattgg

SEQ ID NO: 296716 - DNA, 21 bp, Artificial sequence
  SiRNA target sequence
actgaaaatccgaagattgga

SEQ ID NO: 296717 - DNA, 21 bp, Artificial sequence
  SiRNA target sequence
ctgaaaatccgaagattggac

SEQ ID NO: 296718 - DNA, 21 bp, Artificial sequence
  SiRNA target sequence
tgaaaatccgaagattggacc

SEQ ID NO: 296719 - DNA, 21 bp, Artificial sequence
  SiRNA target sequence
gaaaatccgaagattggacca

SEQ ID NO: 296720 - DNA, 21 bp, Artificial sequence
  SiRNA target sequence
aaaatccgaagattggaccaa

SEQ ID NO: 296721 - DNA, 21 bp, Artificial sequence
  SiRNA target sequence
aaatccgaagattggaccaat

SEQ ID NO: 296722 - DNA, 21 bp, Artificial sequence
  SiRNA target sequence
aatccgaagattggaccaata

SEQ ID NO: 296723 - DNA, 21 bp, Artificial sequence
  SiRNA target sequence
atccgaagattggaccaatat

SEQ ID NO: 296724 - DNA, 21 bp, Artificial sequence
  SiRNA target sequence
tccgaagattggaccaatatc

SEQ ID NO: 296725 - DNA, 21 bp, Artificial sequence
  SiRNA target sequence
ccgaagattggaccaatatca

SEQ ID NO: 296726 - DNA, 21 bp, Artificial sequence
  SiRNA target sequence
cgaagattggaccaatatcag

SEQ ID NO: 296727 - DNA, 21 bp, Artificial sequence
  SiRNA target sequence
gaagattggaccaatatcaga

SEQ ID NO: 296728 - DNA, 21 bp, Artificial sequence
  SiRNA target sequence
aagattggaccaatatcagaa

SEQ ID NO: 296729 - DNA, 21 bp, Artificial sequence
  SiRNA target sequence
agattggaccaatatcagaac

SEQ ID NO: 296730 - DNA, 21 bp, Artificial sequence
  SiRNA target sequence
gattggaccaatatcagaact

SEQ ID NO: 296731 - DNA, 21 bp, Artificial sequence
  SiRNA target sequence
attggaccaatatcagaacta

SEQ ID NO: 296732 - DNA, 21 bp, Artificial sequence
  SiRNA target sequence
ttggaccaatatcagaactag

SEQ ID NO: 296733 - DNA, 21 bp, Artificial sequence
  SiRNA target sequence
tggaccaatatcagaactagc

SEQ ID NO: 296734 - DNA, 21 bp, Artificial sequence
  SiRNA target sequence
ggaccaatatcagaactagcc

SEQ ID NO: 296735 - DNA, 21 bp, Artificial sequence
  SiRNA target sequence
gaccaatatcagaactagcca

SEQ ID NO: 296736 - DNA, 21 bp, Artificial sequence
  SiRNA target sequence
accaatatcagaactagccac

SEQ ID NO: 296737 - DNA, 21 bp, Artificial sequence
  SiRNA target sequence
ccaatatcagaactagccaca

SEQ ID NO: 296738 - DNA, 21 bp, Artificial sequence
  SiRNA target sequence
caatatcagaactagccacag

SEQ ID NO: 296739 - DNA, 21 bp, Artificial sequence
  SiRNA target sequence
aatatcagaactagccacagg

SEQ ID NO: 296740 - DNA, 21 bp, Artificial sequence
  SiRNA target sequence
atatcagaactagccacagga

SEQ ID NO: 296741 - DNA, 21 bp, Artificial sequence
  SiRNA target sequence
tatcagaactagccacaggag

SEQ ID NO: 296742 - DNA, 21 bp, Artificial sequence
  SiRNA target sequence
atcagaactagccacaggagt

SEQ ID NO: 296743 - DNA, 21 bp, Artificial sequence
  SiRNA target sequence
tcagaactagccacaggagtc

SEQ ID NO: 296744 - DNA, 21 bp, Artificial sequence
  SiRNA target sequence
cagaactagccacaggagtca

SEQ ID NO: 296745 - DNA, 21 bp, Artificial sequence
  SiRNA target sequence
agaactagccacaggagtcaa

SEQ ID NO: 296746 - DNA, 21 bp, Artificial sequence
  SiRNA target sequence
gaactagccacaggagtcaac

SEQ ID NO: 296747 - DNA, 21 bp, Artificial sequence
  SiRNA target sequence
aactagccacaggagtcaaca

SEQ ID NO: 296748 - DNA, 21 bp, Artificial sequence
  SiRNA target sequence
actagccacaggagtcaacaa

SEQ ID NO: 296749 - DNA, 21 bp, Artificial sequence
  SiRNA target sequence
ctagccacaggagtcaacaag

SEQ ID NO: 296750 - DNA, 21 bp, Artificial sequence
  SiRNA target sequence
tagccacaggagtcaacaagg

SEQ ID NO: 296751 - DNA, 21 bp, Artificial sequence
  SiRNA target sequence
agccacaggagtcaacaaggt

SEQ ID NO: 296752 - DNA, 21 bp, Artificial sequence
  SiRNA target sequence
gccacaggagtcaacaaggtg

SEQ ID NO: 296753 - DNA, 21 bp, Artificial sequence
  SiRNA target sequence
ccacaggagtcaacaaggtgg

SEQ ID NO: 296754 - DNA, 21 bp, Artificial sequence
  SiRNA target sequence
cacaggagtcaacaaggtggc

SEQ ID NO: 296755 - DNA, 21 bp, Artificial sequence
  SiRNA target sequence
acaggagtcaacaaggtggcg

SEQ ID NO: 296756 - DNA, 21 bp, Artificial sequence
  SiRNA target sequence
caggagtcaacaaggtggcga

SEQ ID NO: 296757 - DNA, 21 bp, Artificial sequence
  SiRNA target sequence
aggagtcaacaaggtggcgaa

SEQ ID NO: 296758 - DNA, 21 bp, Artificial sequence
  SiRNA target sequence
ggagtcaacaaggtggcgaat

SEQ ID NO: 296759 - DNA, 21 bp, Artificial sequence
  SiRNA target sequence
gagtcaacaaggtggcgaatg

SEQ ID NO: 296760 - DNA, 21 bp, Artificial sequence
  SiRNA target sequence
agtcaacaaggtggcgaatgg

SEQ ID NO: 296761 - DNA, 21 bp, Artificial sequence
  SiRNA target sequence
gtcaacaaggtggcgaatggt

SEQ ID NO: 296762 - DNA, 21 bp, Artificial sequence
  SiRNA target sequence
tcaacaaggtggcgaatggta

SEQ ID NO: 296763 - DNA, 21 bp, Artificial sequence
  SiRNA target sequence
caacaaggtggcgaatggtat

SEQ ID NO: 296764 - DNA, 21 bp, Artificial sequence
  SiRNA target sequence
aacaaggtggcgaatggtatt

SEQ ID NO: 296765 - DNA, 21 bp, Artificial sequence
  SiRNA target sequence
acaaggtggcgaatggtattg

SEQ ID NO: 296766 - DNA, 21 bp, Artificial sequence
  SiRNA target sequence
caaggtggcgaatggtattga

SEQ ID NO: 296767 - DNA, 21 bp, Artificial sequence
  SiRNA target sequence
aaggtggcgaatggtattgag

SEQ ID NO: 296768 - DNA, 21 bp, Artificial sequence
  SiRNA target sequence
aggtggcgaatggtattgaga

SEQ ID NO: 296769 - DNA, 21 bp, Artificial sequence
  SiRNA target sequence
ggtggcgaatggtattgagag

SEQ ID NO: 296770 - DNA, 21 bp, Artificial sequence
  SiRNA target sequence
gtggcgaatggtattgagaga

SEQ ID NO: 296771 - DNA, 21 bp, Artificial sequence
  SiRNA target sequence
tggcgaatggtattgagagaa

SEQ ID NO: 296772 - DNA, 21 bp, Artificial sequence
  SiRNA target sequence
ggcgaatggtattgagagaat

SEQ ID NO: 296773 - DNA, 21 bp, Artificial sequence
  SiRNA target sequence
gcgaatggtattgagagaata

SEQ ID NO: 296774 - DNA, 21 bp, Artificial sequence
  SiRNA target sequence
cgaatggtattgagagaatac

SEQ ID NO: 296775 - DNA, 21 bp, Artificial sequence
  SiRNA target sequence
gaatggtattgagagaatacc

SEQ ID NO: 296776 - DNA, 21 bp, Artificial sequence
  SiRNA target sequence
aatggtattgagagaatacct

SEQ ID NO: 296777 - DNA, 21 bp, Artificial sequence
  SiRNA target sequence
atggtattgagagaatacctg

SEQ ID NO: 296778 - DNA, 21 bp, Artificial sequence
  SiRNA target sequence
tggtattgagagaatacctgt

SEQ ID NO: 296779 - DNA, 21 bp, Artificial sequence
  SiRNA target sequence
ggtattgagagaatacctgtg

SEQ ID NO: 296780 - DNA, 21 bp, Artificial sequence
  SiRNA target sequence
gtattgagagaatacctgtga

SEQ ID NO: 296781 - DNA, 21 bp, Artificial sequence
  SiRNA target sequence
tattgagagaatacctgtgat

SEQ ID NO: 296782 - DNA, 21 bp, Artificial sequence
  SiRNA target sequence
attgagagaatacctgtgatt

SEQ ID NO: 296783 - DNA, 21 bp, Artificial sequence
  SiRNA target sequence
ttgagagaatacctgtgattg

SEQ ID NO: 296784 - DNA, 21 bp, Artificial sequence
  SiRNA target sequence
tgagagaatacctgtgattgg

SEQ ID NO: 296785 - DNA, 21 bp, Artificial sequence
  SiRNA target sequence
gagagaatacctgtgattgga

SEQ ID NO: 296786 - DNA, 21 bp, Artificial sequence
  SiRNA target sequence
agagaatacctgtgattggag

SEQ ID NO: 296787 - DNA, 21 bp, Artificial sequence
  SiRNA target sequence
gagaatacctgtgattggaga

SEQ ID NO: 296788 - DNA, 21 bp, Artificial sequence
  SiRNA target sequence
agaatacctgtgattggagag

SEQ ID NO: 296789 - DNA, 21 bp, Artificial sequence
  SiRNA target sequence
gaatacctgtgattggagaga

SEQ ID NO: 296790 - DNA, 21 bp, Artificial sequence
  SiRNA target sequence
aatacctgtgattggagagat

SEQ ID NO: 296791 - DNA, 21 bp, Artificial sequence
  SiRNA target sequence
atacctgtgattggagagatg

SEQ ID NO: 296792 - DNA, 21 bp, Artificial sequence
  SiRNA target sequence
tacctgtgattggagagatgg

SEQ ID NO: 296793 - DNA, 21 bp, Artificial sequence
  SiRNA target sequence
acctgtgattggagagatggc

SEQ ID NO: 296794 - DNA, 21 bp, Artificial sequence
  SiRNA target sequence
cctgtgattggagagatggca

SEQ ID NO: 296795 - DNA, 21 bp, Artificial sequence
  SiRNA target sequence
ctgtgattggagagatggcaa

SEQ ID NO: 296796 - DNA, 21 bp, Artificial sequence
  SiRNA target sequence
tgtgattggagagatggcaaa

SEQ ID NO: 296797 - DNA, 21 bp, Artificial sequence
  SiRNA target sequence
gtgattggagagatggcaaaa

SEQ ID NO: 296798 - DNA, 21 bp, Artificial sequence
  SiRNA target sequence
tgattggagagatggcaaaac

SEQ ID NO: 296799 - DNA, 21 bp, Artificial sequence
  SiRNA target sequence
gattggagagatggcaaaacc

SEQ ID NO: 296800 - DNA, 21 bp, Artificial sequence
  SiRNA target sequence
attggagagatggcaaaacct

SEQ ID NO: 296801 - DNA, 21 bp, Artificial sequence
  SiRNA target sequence
ttggagagatggcaaaacctg

SEQ ID NO: 296802 - DNA, 21 bp, Artificial sequence
  SiRNA target sequence
tggagagatggcaaaacctgt

SEQ ID NO: 296803 - DNA, 21 bp, Artificial sequence
  SiRNA target sequence
ggagagatggcaaaacctgta

SEQ ID NO: 296804 - DNA, 21 bp, Artificial sequence
  SiRNA target sequence
gagagatggcaaaacctgtaa

SEQ ID NO: 296805 - DNA, 21 bp, Artificial sequence
  SiRNA target sequence
agagatggcaaaacctgtaac

SEQ ID NO: 296806 - DNA, 21 bp, Artificial sequence
  SiRNA target sequence
gagatggcaaaacctgtaact

SEQ ID NO: 296807 - DNA, 21 bp, Artificial sequence
  SiRNA target sequence
agatggcaaaacctgtaactt

SEQ ID NO: 296808 - DNA, 21 bp, Artificial sequence
  SiRNA target sequence
gatggcaaaacctgtaacttc

SEQ ID NO: 296809 - DNA, 21 bp, Artificial sequence
  SiRNA target sequence
atggcaaaacctgtaacttca

SEQ ID NO: 296810 - DNA, 21 bp, Artificial sequence
  SiRNA target sequence
tggcaaaacctgtaacttcaa

SEQ ID NO: 296811 - DNA, 21 bp, Artificial sequence
  SiRNA target sequence
ggcaaaacctgtaacttcaac

SEQ ID NO: 296812 - DNA, 21 bp, Artificial sequence
  SiRNA target sequence
gcaaaacctgtaacttcaaca

SEQ ID NO: 296813 - DNA, 21 bp, Artificial sequence
  SiRNA target sequence
caaaacctgtaacttcaacaa

SEQ ID NO: 296814 - DNA, 21 bp, Artificial sequence
  SiRNA target sequence
aaaacctgtaacttcaacaat

SEQ ID NO: 296815 - DNA, 21 bp, Artificial sequence
  SiRNA target sequence
aaacctgtaacttcaacaatt

SEQ ID NO: 296816 - DNA, 21 bp, Artificial sequence
  SiRNA target sequence
aacctgtaacttcaacaatta

SEQ ID NO: 296817 - DNA, 21 bp, Artificial sequence
  SiRNA target sequence
acctgtaacttcaacaattaa

SEQ ID NO: 296818 - DNA, 21 bp, Artificial sequence
  SiRNA target sequence
cctgtaacttcaacaattaaa

SEQ ID NO: 296819 - DNA, 21 bp, Artificial sequence
  SiRNA target sequence
ctgtaacttcaacaattaaat

SEQ ID NO: 296820 - DNA, 21 bp, Artificial sequence
  SiRNA target sequence
tgtaacttcaacaattaaatg

SEQ ID NO: 296821 - DNA, 21 bp, Artificial sequence
  SiRNA target sequence
gtaacttcaacaattaaatgg

SEQ ID NO: 296822 - DNA, 21 bp, Artificial sequence
  SiRNA target sequence
taacttcaacaattaaatggg

SEQ ID NO: 296823 - DNA, 21 bp, Artificial sequence
  SiRNA target sequence
aacttcaacaattaaatgggt

SEQ ID NO: 296824 - DNA, 21 bp, Artificial sequence
  SiRNA target sequence
acttcaacaattaaatgggtt

SEQ ID NO: 296825 - DNA, 21 bp, Artificial sequence
  SiRNA target sequence
cttcaacaattaaatgggttg

SEQ ID NO: 296826 - DNA, 21 bp, Artificial sequence
  SiRNA target sequence
ttcaacaattaaatgggttgc

SEQ ID NO: 296827 - DNA, 21 bp, Artificial sequence
  SiRNA target sequence
tcaacaattaaatgggttgct

SEQ ID NO: 296828 - DNA, 21 bp, Artificial sequence
  SiRNA target sequence
caacaattaaatgggttgctg

SEQ ID NO: 296829 - DNA, 21 bp, Artificial sequence
  SiRNA target sequence
aacaattaaatgggttgctga

SEQ ID NO: 296830 - DNA, 21 bp, Artificial sequence
  SiRNA target sequence
acaattaaatgggttgctgac

SEQ ID NO: 296831 - DNA, 21 bp, Artificial sequence
  SiRNA target sequence
caattaaatgggttgctgaca

SEQ ID NO: 296832 - DNA, 21 bp, Artificial sequence
  SiRNA target sequence
aattaaatgggttgctgacaa

SEQ ID NO: 296833 - DNA, 21 bp, Artificial sequence
  SiRNA target sequence
attaaatgggttgctgacaag

SEQ ID NO: 296834 - DNA, 21 bp, Artificial sequence
  SiRNA target sequence
ttaaatgggttgctgacaaga

SEQ ID NO: 296835 - DNA, 21 bp, Artificial sequence
  SiRNA target sequence
taaatgggttgctgacaagat

SEQ ID NO: 296836 - DNA, 21 bp, Artificial sequence
  SiRNA target sequence
aaatgggttgctgacaagatt

SEQ ID NO: 296837 - DNA, 21 bp, Artificial sequence
  SiRNA target sequence
aatgggttgctgacaagattg

SEQ ID NO: 296838 - DNA, 21 bp, Artificial sequence
  SiRNA target sequence
atgggttgctgacaagattgg

SEQ ID NO: 296839 - DNA, 21 bp, Artificial sequence
  SiRNA target sequence
tgggttgctgacaagattgga

SEQ ID NO: 296840 - DNA, 21 bp, Artificial sequence
  SiRNA target sequence
gggttgctgacaagattggat

SEQ ID NO: 296841 - DNA, 21 bp, Artificial sequence
  SiRNA target sequence
ggttgctgacaagattggatc

SEQ ID NO: 296842 - DNA, 21 bp, Artificial sequence
  SiRNA target sequence
gttgctgacaagattggatct

SEQ ID NO: 296843 - DNA, 21 bp, Artificial sequence
  SiRNA target sequence
ttgctgacaagattggatctg

SEQ ID NO: 296844 - DNA, 21 bp, Artificial sequence
  SiRNA target sequence
tgctgacaagattggatctgt

SEQ ID NO: 296845 - DNA, 21 bp, Artificial sequence
  SiRNA target sequence
gctgacaagattggatctgtg

SEQ ID NO: 296846 - DNA, 21 bp, Artificial sequence
  SiRNA target sequence
ctgacaagattggatctgtgg

SEQ ID NO: 296847 - DNA, 21 bp, Artificial sequence
  SiRNA target sequence
tgacaagattggatctgtggc

SEQ ID NO: 296848 - DNA, 21 bp, Artificial sequence
  SiRNA target sequence
gacaagattggatctgtggca

SEQ ID NO: 296849 - DNA, 21 bp, Artificial sequence
  SiRNA target sequence
acaagattggatctgtggcag

SEQ ID NO: 296850 - DNA, 21 bp, Artificial sequence
  SiRNA target sequence
caagattggatctgtggcagc

SEQ ID NO: 296851 - DNA, 21 bp, Artificial sequence
  SiRNA target sequence
aagattggatctgtggcagca

SEQ ID NO: 296852 - DNA, 21 bp, Artificial sequence
  SiRNA target sequence
agattggatctgtggcagcaa

SEQ ID NO: 296853 - DNA, 21 bp, Artificial sequence
  SiRNA target sequence
gattggatctgtggcagcaat

SEQ ID NO: 296854 - DNA, 21 bp, Artificial sequence
  SiRNA target sequence
attggatctgtggcagcaatt

SEQ ID NO: 296855 - DNA, 21 bp, Artificial sequence
  SiRNA target sequence
ttggatctgtggcagcaattt

SEQ ID NO: 296856 - DNA, 21 bp, Artificial sequence
  SiRNA target sequence
tggatctgtggcagcaatttt

SEQ ID NO: 296857 - DNA, 21 bp, Artificial sequence
  SiRNA target sequence
ggatctgtggcagcaattttt

SEQ ID NO: 296858 - DNA, 21 bp, Artificial sequence
  SiRNA target sequence
gatctgtggcagcaatttttg

SEQ ID NO: 296859 - DNA, 21 bp, Artificial sequence
  SiRNA target sequence
atctgtggcagcaatttttgg

SEQ ID NO: 296860 - DNA, 21 bp, Artificial sequence
  SiRNA target sequence
tctgtggcagcaatttttgga

SEQ ID NO: 296861 - DNA, 21 bp, Artificial sequence
  SiRNA target sequence
ctgtggcagcaatttttggat

SEQ ID NO: 296862 - DNA, 21 bp, Artificial sequence
  SiRNA target sequence
tgtggcagcaatttttggatg

SEQ ID NO: 296863 - DNA, 21 bp, Artificial sequence
  SiRNA target sequence
gtggcagcaatttttggatgg

SEQ ID NO: 296864 - DNA, 21 bp, Artificial sequence
  SiRNA target sequence
tggcagcaatttttggatggt

SEQ ID NO: 296865 - DNA, 21 bp, Artificial sequence
  SiRNA target sequence
ggcagcaatttttggatggtc

SEQ ID NO: 296866 - DNA, 21 bp, Artificial sequence
  SiRNA target sequence
gcagcaatttttggatggtcg

SEQ ID NO: 296867 - DNA, 21 bp, Artificial sequence
  SiRNA target sequence
cagcaatttttggatggtcga

SEQ ID NO: 296868 - DNA, 21 bp, Artificial sequence
  SiRNA target sequence
agcaatttttggatggtcgaa

SEQ ID NO: 296869 - DNA, 21 bp, Artificial sequence
  SiRNA target sequence
gcaatttttggatggtcgaaa

SEQ ID NO: 296870 - DNA, 21 bp, Artificial sequence
  SiRNA target sequence
caatttttggatggtcgaaac

SEQ ID NO: 296871 - DNA, 21 bp, Artificial sequence
  SiRNA target sequence
aatttttggatggtcgaaacc

SEQ ID NO: 296872 - DNA, 21 bp, Artificial sequence
  SiRNA target sequence
atttttggatggtcgaaaccc

SEQ ID NO: 296873 - DNA, 21 bp, Artificial sequence
  SiRNA target sequence
tttttggatggtcgaaaccca

SEQ ID NO: 296874 - DNA, 21 bp, Artificial sequence
  SiRNA target sequence
ttttggatggtcgaaacccag

SEQ ID NO: 296875 - DNA, 21 bp, Artificial sequence
  SiRNA target sequence
tttggatggtcgaaacccaga

SEQ ID NO: 296876 - DNA, 21 bp, Artificial sequence
  SiRNA target sequence
ttggatggtcgaaacccagaa

SEQ ID NO: 296877 - DNA, 21 bp, Artificial sequence
  SiRNA target sequence
tggatggtcgaaacccagaaa

SEQ ID NO: 296878 - DNA, 21 bp, Artificial sequence
  SiRNA target sequence
ggatggtcgaaacccagaaat

SEQ ID NO: 296879 - DNA, 21 bp, Artificial sequence
  SiRNA target sequence
gatggtcgaaacccagaaatc

SEQ ID NO: 296880 - DNA, 21 bp, Artificial sequence
  SiRNA target sequence
atggtcgaaacccagaaatct

SEQ ID NO: 296881 - DNA, 21 bp, Artificial sequence
  SiRNA target sequence
tggtcgaaacccagaaatcta

SEQ ID NO: 296882 - DNA, 21 bp, Artificial sequence
  SiRNA target sequence
ggtcgaaacccagaaatctag

SEQ ID NO: 296883 - DNA, 21 bp, Artificial sequence
  SiRNA target sequence
gtcgaaacccagaaatctaga

SEQ ID NO: 296884 - DNA, 21 bp, Artificial sequence
  SiRNA target sequence
tcgaaacccagaaatctagaa

SEQ ID NO: 296885 - DNA, 21 bp, Artificial sequence
  SiRNA target sequence
cgaaacccagaaatctagaac

SEQ ID NO: 296886 - DNA, 21 bp, Artificial sequence
  SiRNA target sequence
gaaacccagaaatctagaaca

SEQ ID NO: 296887 - DNA, 21 bp, Artificial sequence
  SiRNA target sequence
aaacccagaaatctagaacaa

SEQ ID NO: 296888 - DNA, 21 bp, Artificial sequence
  SiRNA target sequence
aacccagaaatctagaacaag

SEQ ID NO: 296889 - DNA, 21 bp, Artificial sequence
  SiRNA target sequence
acccagaaatctagaacaagt

SEQ ID NO: 296890 - DNA, 21 bp, Artificial sequence
  SiRNA target sequence
cccagaaatctagaacaagtt

SEQ ID NO: 296891 - DNA, 21 bp, Artificial sequence
  SiRNA target sequence
ccagaaatctagaacaagtta

SEQ ID NO: 296892 - DNA, 21 bp, Artificial sequence
  SiRNA target sequence
cagaaatctagaacaagttaa

SEQ ID NO: 296893 - DNA, 21 bp, Artificial sequence
  SiRNA target sequence
agaaatctagaacaagttaat

SEQ ID NO: 296894 - DNA, 21 bp, Artificial sequence
  SiRNA target sequence
gaaatctagaacaagttaatt

SEQ ID NO: 296895 - DNA, 21 bp, Artificial sequence
  SiRNA target sequence
aaatctagaacaagttaattt

SEQ ID NO: 296896 - DNA, 21 bp, Artificial sequence
  SiRNA target sequence
aatctagaacaagttaattta

SEQ ID NO: 296897 - DNA, 21 bp, Artificial sequence
  SiRNA target sequence
atctagaacaagttaatttat

SEQ ID NO: 296898 - DNA, 21 bp, Artificial sequence
  SiRNA target sequence
tctagaacaagttaatttata

SEQ ID NO: 296899 - DNA, 21 bp, Artificial sequence
  SiRNA target sequence
ctagaacaagttaatttatat

SEQ ID NO: 296900 - DNA, 21 bp, Artificial sequence
  SiRNA target sequence
tagaacaagttaatttatatc

SEQ ID NO: 296901 - DNA, 21 bp, Artificial sequence
  SiRNA target sequence
agaacaagttaatttatatca

SEQ ID NO: 296902 - DNA, 21 bp, Artificial sequence
  SiRNA target sequence
gaacaagttaatttatatcag

SEQ ID NO: 296903 - DNA, 21 bp, Artificial sequence
  SiRNA target sequence
aacaagttaatttatatcaga

SEQ ID NO: 296904 - DNA, 21 bp, Artificial sequence
  SiRNA target sequence
acaagttaatttatatcagaa

SEQ ID NO: 296905 - DNA, 21 bp, Artificial sequence
  SiRNA target sequence
caagttaatttatatcagaat

SEQ ID NO: 296906 - DNA, 21 bp, Artificial sequence
  SiRNA target sequence
aagttaatttatatcagaatg

SEQ ID NO: 296907 - DNA, 21 bp, Artificial sequence
  SiRNA target sequence
agttaatttatatcagaatgt

SEQ ID NO: 296908 - DNA, 21 bp, Artificial sequence
  SiRNA target sequence
gttaatttatatcagaatgtt

SEQ ID NO: 296909 - DNA, 21 bp, Artificial sequence
  SiRNA target sequence
ttaatttatatcagaatgttc

SEQ ID NO: 296910 - DNA, 21 bp, Artificial sequence
  SiRNA target sequence
taatttatatcagaatgttcc

SEQ ID NO: 296911 - DNA, 21 bp, Artificial sequence
  SiRNA target sequence
aatttatatcagaatgttcct

SEQ ID NO: 296912 - DNA, 21 bp, Artificial sequence
  SiRNA target sequence
atttatatcagaatgttcctg

SEQ ID NO: 296913 - DNA, 21 bp, Artificial sequence
  SiRNA target sequence
tttatatcagaatgttcctgg

SEQ ID NO: 296914 - DNA, 21 bp, Artificial sequence
  SiRNA target sequence
ttatatcagaatgttcctgga

SEQ ID NO: 296915 - DNA, 21 bp, Artificial sequence
  SiRNA target sequence
tatatcagaatgttcctggat

SEQ ID NO: 296916 - DNA, 21 bp, Artificial sequence
  SiRNA target sequence
atatcagaatgttcctggatg

SEQ ID NO: 296917 - DNA, 21 bp, Artificial sequence
  SiRNA target sequence
tatcagaatgttcctggatgg

SEQ ID NO: 296918 - DNA, 21 bp, Artificial sequence
  SiRNA target sequence
atcagaatgttcctggatggg

SEQ ID NO: 296919 - DNA, 21 bp, Artificial sequence
  SiRNA target sequence
tcagaatgttcctggatgggg

SEQ ID NO: 296920 - DNA, 21 bp, Artificial sequence
  SiRNA target sequence
cagaatgttcctggatggggt

SEQ ID NO: 296921 - DNA, 21 bp, Artificial sequence
  SiRNA target sequence
agaatgttcctggatggggtt

SEQ ID NO: 296922 - DNA, 21 bp, Artificial sequence
  SiRNA target sequence
gaatgttcctggatggggtta

SEQ ID NO: 296923 - DNA, 21 bp, Artificial sequence
  SiRNA target sequence
aatgttcctggatggggttat

SEQ ID NO: 296924 - DNA, 21 bp, Artificial sequence
  SiRNA target sequence
atgttcctggatggggttatt

SEQ ID NO: 296925 - DNA, 21 bp, Artificial sequence
  SiRNA target sequence
tgttcctggatggggttattc

SEQ ID NO: 296926 - DNA, 21 bp, Artificial sequence
  SiRNA target sequence
gttcctggatggggttattca

SEQ ID NO: 296927 - DNA, 21 bp, Artificial sequence
  SiRNA target sequence
ttcctggatggggttattcac

SEQ ID NO: 296928 - DNA, 21 bp, Artificial sequence
  SiRNA target sequence
tcctggatggggttattcact

SEQ ID NO: 296929 - DNA, 21 bp, Artificial sequence
  SiRNA target sequence
cctggatggggttattcactc

SEQ ID NO: 296930 - DNA, 21 bp, Artificial sequence
  SiRNA target sequence
ctggatggggttattcactct

SEQ ID NO: 296931 - DNA, 21 bp, Artificial sequence
  SiRNA target sequence
tggatggggttattcactcta

SEQ ID NO: 296932 - DNA, 21 bp, Artificial sequence
  SiRNA target sequence
ggatggggttattcactctat

SEQ ID NO: 296933 - DNA, 21 bp, Artificial sequence
  SiRNA target sequence
gatggggttattcactctata

SEQ ID NO: 296934 - DNA, 21 bp, Artificial sequence
  SiRNA target sequence
atggggttattcactctataa

SEQ ID NO: 296935 - DNA, 21 bp, Artificial sequence
  SiRNA target sequence
tggggttattcactctataag

SEQ ID NO: 296936 - DNA, 21 bp, Artificial sequence
  SiRNA target sequence
ggggttattcactctataagg

SEQ ID NO: 296937 - DNA, 21 bp, Artificial sequence
  SiRNA target sequence
gggttattcactctataaggg

SEQ ID NO: 296938 - DNA, 21 bp, Artificial sequence
  SiRNA target sequence
ggttattcactctataaggga

SEQ ID NO: 296939 - DNA, 21 bp, Artificial sequence
  SiRNA target sequence
gttattcactctataagggaa

SEQ ID NO: 296940 - DNA, 21 bp, Artificial sequence
  SiRNA target sequence
ttattcactctataagggaat

SEQ ID NO: 296941 - DNA, 21 bp, Artificial sequence
  SiRNA target sequence
tattcactctataagggaata

SEQ ID NO: 296942 - DNA, 21 bp, Artificial sequence
  SiRNA target sequence
attcactctataagggaatag

SEQ ID NO: 296943 - DNA, 21 bp, Artificial sequence
  SiRNA target sequence
ttcactctataagggaataga

SEQ ID NO: 296944 - DNA, 21 bp, Artificial sequence
  SiRNA target sequence
tcactctataagggaatagat

SEQ ID NO: 296945 - DNA, 21 bp, Artificial sequence
  SiRNA target sequence
cactctataagggaatagata

SEQ ID NO: 296946 - DNA, 21 bp, Artificial sequence
  SiRNA target sequence
actctataagggaatagataa

SEQ ID NO: 296947 - DNA, 21 bp, Artificial sequence
  SiRNA target sequence
ctctataagggaatagataat

SEQ ID NO: 296948 - DNA, 21 bp, Artificial sequence
  SiRNA target sequence
tctataagggaatagataata

SEQ ID NO: 296949 - DNA, 21 bp, Artificial sequence
  SiRNA target sequence
ctataagggaatagataatag

SEQ ID NO: 296950 - DNA, 21 bp, Artificial sequence
  SiRNA target sequence
tataagggaatagataatagt

SEQ ID NO: 296951 - DNA, 21 bp, Artificial sequence
  SiRNA target sequence
ataagggaatagataatagtg

SEQ ID NO: 296952 - DNA, 21 bp, Artificial sequence
  SiRNA target sequence
taagggaatagataatagtgt

SEQ ID NO: 296953 - DNA, 21 bp, Artificial sequence
  SiRNA target sequence
aagggaatagataatagtgtg

SEQ ID NO: 296954 - DNA, 21 bp, Artificial sequence
  SiRNA target sequence
agggaatagataatagtgtgc

SEQ ID NO: 296955 - DNA, 21 bp, Artificial sequence
  SiRNA target sequence
gggaatagataatagtgtgcc

SEQ ID NO: 296956 - DNA, 21 bp, Artificial sequence
  SiRNA target sequence
ggaatagataatagtgtgcca

SEQ ID NO: 296957 - DNA, 21 bp, Artificial sequence
  SiRNA target sequence
gaatagataatagtgtgccat

SEQ ID NO: 296958 - DNA, 21 bp, Artificial sequence
  SiRNA target sequence
aatagataatagtgtgccatt

SEQ ID NO: 296959 - DNA, 21 bp, Artificial sequence
  SiRNA target sequence
atagataatagtgtgccattg

SEQ ID NO: 296960 - DNA, 21 bp, Artificial sequence
  SiRNA target sequence
tagataatagtgtgccattgg

SEQ ID NO: 296961 - DNA, 21 bp, Artificial sequence
  SiRNA target sequence
agataatagtgtgccattggc

SEQ ID NO: 296962 - DNA, 21 bp, Artificial sequence
  SiRNA target sequence
gataatagtgtgccattggct

SEQ ID NO: 296963 - DNA, 21 bp, Artificial sequence
  SiRNA target sequence
ataatagtgtgccattggctt

SEQ ID NO: 296964 - DNA, 21 bp, Artificial sequence
  SiRNA target sequence
taatagtgtgccattggcttt

SEQ ID NO: 296965 - DNA, 21 bp, Artificial sequence
  SiRNA target sequence
aatagtgtgccattggctttt

SEQ ID NO: 296966 - DNA, 21 bp, Artificial sequence
  SiRNA target sequence
atagtgtgccattggcttttg

SEQ ID NO: 296967 - DNA, 21 bp, Artificial sequence
  SiRNA target sequence
tagtgtgccattggcttttga

SEQ ID NO: 296968 - DNA, 21 bp, Artificial sequence
  SiRNA target sequence
agtgtgccattggcttttgac

SEQ ID NO: 296969 - DNA, 21 bp, Artificial sequence
  SiRNA target sequence
gtgtgccattggcttttgacc

SEQ ID NO: 296970 - DNA, 21 bp, Artificial sequence
  SiRNA target sequence
tgtgccattggcttttgaccc

SEQ ID NO: 296971 - DNA, 21 bp, Artificial sequence
  SiRNA target sequence
gtgccattggcttttgacccc

SEQ ID NO: 296972 - DNA, 21 bp, Artificial sequence
  SiRNA target sequence
tgccattggcttttgacccca

SEQ ID NO: 296973 - DNA, 21 bp, Artificial sequence
  SiRNA target sequence
gccattggcttttgaccccaa

SEQ ID NO: 296974 - DNA, 21 bp, Artificial sequence
  SiRNA target sequence
ccattggcttttgaccccaat

SEQ ID NO: 296975 - DNA, 21 bp, Artificial sequence
  SiRNA target sequence
cattggcttttgaccccaata

SEQ ID NO: 296976 - DNA, 21 bp, Artificial sequence
  SiRNA target sequence
attggcttttgaccccaataa

SEQ ID NO: 296977 - DNA, 21 bp, Artificial sequence
  SiRNA target sequence
ttggcttttgaccccaataac

SEQ ID NO: 296978 - DNA, 21 bp, Artificial sequence
  SiRNA target sequence
tggcttttgaccccaataacg

SEQ ID NO: 296979 - DNA, 21 bp, Artificial sequence
  SiRNA target sequence
ggcttttgaccccaataacga

SEQ ID NO: 296980 - DNA, 21 bp, Artificial sequence
  SiRNA target sequence
gcttttgaccccaataacgaa

SEQ ID NO: 296981 - DNA, 21 bp, Artificial sequence
  SiRNA target sequence
cttttgaccccaataacgaac

SEQ ID NO: 296982 - DNA, 21 bp, Artificial sequence
  SiRNA target sequence
ttttgaccccaataacgaact

SEQ ID NO: 296983 - DNA, 21 bp, Artificial sequence
  SiRNA target sequence
tttgaccccaataacgaacta

SEQ ID NO: 296984 - DNA, 21 bp, Artificial sequence
  SiRNA target sequence
ttgaccccaataacgaactag

SEQ ID NO: 296985 - DNA, 21 bp, Artificial sequence
  SiRNA target sequence
tgaccccaataacgaactagg

SEQ ID NO: 296986 - DNA, 21 bp, Artificial sequence
  SiRNA target sequence
gaccccaataacgaactaggt

SEQ ID NO: 296987 - DNA, 21 bp, Artificial sequence
  SiRNA target sequence
accccaataacgaactaggtg

SEQ ID NO: 296988 - DNA, 21 bp, Artificial sequence
  SiRNA target sequence
ccccaataacgaactaggtga

SEQ ID NO: 296989 - DNA, 21 bp, Artificial sequence
  SiRNA target sequence
cccaataacgaactaggtgat

SEQ ID NO: 296990 - DNA, 21 bp, Artificial sequence
  SiRNA target sequence
ccaataacgaactaggtgatt

SEQ ID NO: 296991 - DNA, 21 bp, Artificial sequence
  SiRNA target sequence
caataacgaactaggtgattt

SEQ ID NO: 296992 - DNA, 21 bp, Artificial sequence
  SiRNA target sequence
aataacgaactaggtgatttg

SEQ ID NO: 296993 - DNA, 21 bp, Artificial sequence
  SiRNA target sequence
ataacgaactaggtgatttga

SEQ ID NO: 296994 - DNA, 21 bp, Artificial sequence
  SiRNA target sequence
taacgaactaggtgatttgag

SEQ ID NO: 296995 - DNA, 21 bp, Artificial sequence
  SiRNA target sequence
aacgaactaggtgatttgaga

SEQ ID NO: 296996 - DNA, 21 bp, Artificial sequence
  SiRNA target sequence
acgaactaggtgatttgagag

SEQ ID NO: 296997 - DNA, 21 bp, Artificial sequence
  SiRNA target sequence
cgaactaggtgatttgagaga

SEQ ID NO: 296998 - DNA, 21 bp, Artificial sequence
  SiRNA target sequence
gaactaggtgatttgagagat

SEQ ID NO: 296999 - DNA, 21 bp, Artificial sequence
  SiRNA target sequence
aactaggtgatttgagagatg

SEQ ID NO: 297000 - DNA, 21 bp, Artificial sequence
  SiRNA target sequence
actaggtgatttgagagatgt

SEQ ID NO: 297001 - DNA, 21 bp, Artificial sequence
  SiRNA target sequence
ctaggtgatttgagagatgta

SEQ ID NO: 297002 - DNA, 21 bp, Artificial sequence
  SiRNA target sequence
taggtgatttgagagatgtat

SEQ ID NO: 297003 - DNA, 21 bp, Artificial sequence
  SiRNA target sequence
aggtgatttgagagatgtatt

SEQ ID NO: 297004 - DNA, 21 bp, Artificial sequence
  SiRNA target sequence
ggtgatttgagagatgtattt

SEQ ID NO: 297005 - DNA, 21 bp, Artificial sequence
  SiRNA target sequence
gtgatttgagagatgtatttc

SEQ ID NO: 297006 - DNA, 21 bp, Artificial sequence
  SiRNA target sequence
tgatttgagagatgtatttcc

SEQ ID NO: 297007 - DNA, 21 bp, Artificial sequence
  SiRNA target sequence
gatttgagagatgtatttcct

SEQ ID NO: 297008 - DNA, 21 bp, Artificial sequence
  SiRNA target sequence
atttgagagatgtatttcctt

SEQ ID NO: 297009 - DNA, 21 bp, Artificial sequence
  SiRNA target sequence
tttgagagatgtatttccttc

SEQ ID NO: 297010 - DNA, 21 bp, Artificial sequence
  SiRNA target sequence
ttgagagatgtatttccttct

SEQ ID NO: 297011 - DNA, 21 bp, Artificial sequence
  SiRNA target sequence
tgagagatgtatttccttctg

SEQ ID NO: 297012 - DNA, 21 bp, Artificial sequence
  SiRNA target sequence
gagagatgtatttccttctgg

SEQ ID NO: 297013 - DNA, 21 bp, Artificial sequence
  SiRNA target sequence
agagatgtatttccttctgga

SEQ ID NO: 297014 - DNA, 21 bp, Artificial sequence
  SiRNA target sequence
gagatgtatttccttctggag

SEQ ID NO: 297015 - DNA, 21 bp, Artificial sequence
  SiRNA target sequence
agatgtatttccttctggagt

SEQ ID NO: 297016 - DNA, 21 bp, Artificial sequence
  SiRNA target sequence
gatgtatttccttctggagtt

SEQ ID NO: 297017 - DNA, 21 bp, Artificial sequence
  SiRNA target sequence
atgtatttccttctggagttg

SEQ ID NO: 297018 - DNA, 21 bp, Artificial sequence
  SiRNA target sequence
tgtatttccttctggagttga

SEQ ID NO: 297019 - DNA, 21 bp, Artificial sequence
  SiRNA target sequence
gtatttccttctggagttgat

SEQ ID NO: 297020 - DNA, 21 bp, Artificial sequence
  SiRNA target sequence
tatttccttctggagttgatg

SEQ ID NO: 297021 - DNA, 21 bp, Artificial sequence
  SiRNA target sequence
atttccttctggagttgatga

SEQ ID NO: 297022 - DNA, 21 bp, Artificial sequence
  SiRNA target sequence
tttccttctggagttgatgaa

SEQ ID NO: 297023 - DNA, 21 bp, Artificial sequence
  SiRNA target sequence
ttccttctggagttgatgaaa

SEQ ID NO: 297024 - DNA, 21 bp, Artificial sequence
  SiRNA target sequence
tccttctggagttgatgaaat

SEQ ID NO: 297025 - DNA, 21 bp, Artificial sequence
  SiRNA target sequence
ccttctggagttgatgaaatg

SEQ ID NO: 297026 - DNA, 21 bp, Artificial sequence
  SiRNA target sequence
cttctggagttgatgaaatgg

SEQ ID NO: 297027 - DNA, 21 bp, Artificial sequence
  SiRNA target sequence
ttctggagttgatgaaatggc

SEQ ID NO: 297028 - DNA, 21 bp, Artificial sequence
  SiRNA target sequence
tctggagttgatgaaatggcg

SEQ ID NO: 297029 - DNA, 21 bp, Artificial sequence
  SiRNA target sequence
ctggagttgatgaaatggcga

SEQ ID NO: 297030 - DNA, 21 bp, Artificial sequence
  SiRNA target sequence
tggagttgatgaaatggcgat

SEQ ID NO: 297031 - DNA, 21 bp, Artificial sequence
  SiRNA target sequence
ggagttgatgaaatggcgata

SEQ ID NO: 297032 - DNA, 21 bp, Artificial sequence
  SiRNA target sequence
gagttgatgaaatggcgatag

SEQ ID NO: 297033 - DNA, 21 bp, Artificial sequence
  SiRNA target sequence
agttgatgaaatggcgatagg

SEQ ID NO: 297034 - DNA, 21 bp, Artificial sequence
  SiRNA target sequence
gttgatgaaatggcgatagga

SEQ ID NO: 297035 - DNA, 21 bp, Artificial sequence
  SiRNA target sequence
ttgatgaaatggcgataggat

SEQ ID NO: 297036 - DNA, 21 bp, Artificial sequence
  SiRNA target sequence
tgatgaaatggcgataggata

SEQ ID NO: 297037 - DNA, 21 bp, Artificial sequence
  SiRNA target sequence
gatgaaatggcgataggatat

SEQ ID NO: 297038 - DNA, 21 bp, Artificial sequence
  SiRNA target sequence
atgaaatggcgataggatatg

SEQ ID NO: 297039 - DNA, 21 bp, Artificial sequence
  SiRNA target sequence
tgaaatggcgataggatatgt

SEQ ID NO: 297040 - DNA, 21 bp, Artificial sequence
  SiRNA target sequence
gaaatggcgataggatatgtt

SEQ ID NO: 297041 - DNA, 21 bp, Artificial sequence
  SiRNA target sequence
aaatggcgataggatatgttt

SEQ ID NO: 297042 - DNA, 21 bp, Artificial sequence
  SiRNA target sequence
aatggcgataggatatgtttg

SEQ ID NO: 297043 - DNA, 21 bp, Artificial sequence
  SiRNA target sequence
atggcgataggatatgtttgt

SEQ ID NO: 297044 - DNA, 21 bp, Artificial sequence
  SiRNA target sequence
tggcgataggatatgtttgtg

SEQ ID NO: 297045 - DNA, 21 bp, Artificial sequence
  SiRNA target sequence
ggcgataggatatgtttgtgg

SEQ ID NO: 297046 - DNA, 21 bp, Artificial sequence
  SiRNA target sequence
gcgataggatatgtttgtggc

SEQ ID NO: 297047 - DNA, 21 bp, Artificial sequence
  SiRNA target sequence
cgataggatatgtttgtggca

SEQ ID NO: 297048 - DNA, 21 bp, Artificial sequence
  SiRNA target sequence
gataggatatgtttgtggcaa

SEQ ID NO: 297049 - DNA, 21 bp, Artificial sequence
  SiRNA target sequence
ataggatatgtttgtggcaat

SEQ ID NO: 297050 - DNA, 21 bp, Artificial sequence
  SiRNA target sequence
taggatatgtttgtggcaatc

SEQ ID NO: 297051 - DNA, 21 bp, Artificial sequence
  SiRNA target sequence
aggatatgtttgtggcaatcc

SEQ ID NO: 297052 - DNA, 21 bp, Artificial sequence
  SiRNA target sequence
ggatatgtttgtggcaatcct

SEQ ID NO: 297053 - DNA, 21 bp, Artificial sequence
  SiRNA target sequence
gatatgtttgtggcaatcctg

SEQ ID NO: 297054 - DNA, 21 bp, Artificial sequence
  SiRNA target sequence
atatgtttgtggcaatcctgc

SEQ ID NO: 297055 - DNA, 21 bp, Artificial sequence
  SiRNA target sequence
tatgtttgtggcaatcctgct

SEQ ID NO: 297056 - DNA, 21 bp, Artificial sequence
  SiRNA target sequence
atgtttgtggcaatcctgctg

SEQ ID NO: 297057 - DNA, 21 bp, Artificial sequence
  SiRNA target sequence
tgtttgtggcaatcctgctgt

SEQ ID NO: 297058 - DNA, 21 bp, Artificial sequence
  SiRNA target sequence
gtttgtggcaatcctgctgtt

SEQ ID NO: 297059 - DNA, 21 bp, Artificial sequence
  SiRNA target sequence
tttgtggcaatcctgctgtta

SEQ ID NO: 297060 - DNA, 21 bp, Artificial sequence
  SiRNA target sequence
ttgtggcaatcctgctgttaa

SEQ ID NO: 297061 - DNA, 21 bp, Artificial sequence
  SiRNA target sequence
tgtggcaatcctgctgttaaa

SEQ ID NO: 297062 - DNA, 21 bp, Artificial sequence
  SiRNA target sequence
gtggcaatcctgctgttaaac

SEQ ID NO: 297063 - DNA, 21 bp, Artificial sequence
  SiRNA target sequence
tggcaatcctgctgttaaaca

SEQ ID NO: 297064 - DNA, 21 bp, Artificial sequence
  SiRNA target sequence
ggcaatcctgctgttaaacat

SEQ ID NO: 297065 - DNA, 21 bp, Artificial sequence
  SiRNA target sequence
gcaatcctgctgttaaacatg

SEQ ID NO: 297066 - DNA, 21 bp, Artificial sequence
  SiRNA target sequence
caatcctgctgttaaacatgt

SEQ ID NO: 297067 - DNA, 21 bp, Artificial sequence
  SiRNA target sequence
aatcctgctgttaaacatgtg

SEQ ID NO: 297068 - DNA, 21 bp, Artificial sequence
  SiRNA target sequence
atcctgctgttaaacatgtgc

SEQ ID NO: 297069 - DNA, 21 bp, Artificial sequence
  SiRNA target sequence
tcctgctgttaaacatgtgct

SEQ ID NO: 297070 - DNA, 21 bp, Artificial sequence
  SiRNA target sequence
cctgctgttaaacatgtgcta

SEQ ID NO: 297071 - DNA, 21 bp, Artificial sequence
  SiRNA target sequence
ctgctgttaaacatgtgctat

SEQ ID NO: 297072 - DNA, 21 bp, Artificial sequence
  SiRNA target sequence
tgctgttaaacatgtgctatc

SEQ ID NO: 297073 - DNA, 21 bp, Artificial sequence
  SiRNA target sequence
gctgttaaacatgtgctatct

SEQ ID NO: 297074 - DNA, 21 bp, Artificial sequence
  SiRNA target sequence
ctgttaaacatgtgctatctt

SEQ ID NO: 297075 - DNA, 21 bp, Artificial sequence
  SiRNA target sequence
tgttaaacatgtgctatcttg

SEQ ID NO: 297076 - DNA, 21 bp, Artificial sequence
  SiRNA target sequence
gttaaacatgtgctatcttgg

SEQ ID NO: 297077 - DNA, 21 bp, Artificial sequence
  SiRNA target sequence
ttaaacatgtgctatcttgga

SEQ ID NO: 297078 - DNA, 21 bp, Artificial sequence
  SiRNA target sequence
taaacatgtgctatcttggaa

SEQ ID NO: 297079 - DNA, 21 bp, Artificial sequence
  SiRNA target sequence
aaacatgtgctatcttggaat

SEQ ID NO: 297080 - DNA, 21 bp, Artificial sequence
  SiRNA target sequence
aacatgtgctatcttggaata

SEQ ID NO: 297081 - DNA, 21 bp, Artificial sequence
  SiRNA target sequence
acatgtgctatcttggaatac

SEQ ID NO: 297082 - DNA, 21 bp, Artificial sequence
  SiRNA target sequence
catgtgctatcttggaatact

SEQ ID NO: 297083 - DNA, 21 bp, Artificial sequence
  SiRNA target sequence
atgtgctatcttggaatacta

SEQ ID NO: 297084 - DNA, 21 bp, Artificial sequence
  SiRNA target sequence
tgtgctatcttggaatactac

SEQ ID NO: 297085 - DNA, 21 bp, Artificial sequence
  SiRNA target sequence
gtgctatcttggaatactacg

SEQ ID NO: 297086 - DNA, 21 bp, Artificial sequence
  SiRNA target sequence
tgctatcttggaatactacgg

SEQ ID NO: 297087 - DNA, 21 bp, Artificial sequence
  SiRNA target sequence
gctatcttggaatactacgga

SEQ ID NO: 297088 - DNA, 21 bp, Artificial sequence
  SiRNA target sequence
ctatcttggaatactacggat

SEQ ID NO: 297089 - DNA, 21 bp, Artificial sequence
  SiRNA target sequence
tatcttggaatactacggata

SEQ ID NO: 297090 - DNA, 21 bp, Artificial sequence
  SiRNA target sequence
atcttggaatactacggataa

SEQ ID NO: 297091 - DNA, 21 bp, Artificial sequence
  SiRNA target sequence
tcttggaatactacggataaa

SEQ ID NO: 297092 - DNA, 21 bp, Artificial sequence
  SiRNA target sequence
cttggaatactacggataaag

SEQ ID NO: 297093 - DNA, 21 bp, Artificial sequence
  SiRNA target sequence
ttggaatactacggataaagt

SEQ ID NO: 297094 - DNA, 21 bp, Artificial sequence
  SiRNA target sequence
tggaatactacggataaagtt

SEQ ID NO: 297095 - DNA, 21 bp, Artificial sequence
  SiRNA target sequence
ggaatactacggataaagttc

SEQ ID NO: 297096 - DNA, 21 bp, Artificial sequence
  SiRNA target sequence
gaatactacggataaagttca

SEQ ID NO: 297097 - DNA, 21 bp, Artificial sequence
  SiRNA target sequence
aatactacggataaagttcaa

SEQ ID NO: 297098 - DNA, 21 bp, Artificial sequence
  SiRNA target sequence
atactacggataaagttcaag

SEQ ID NO: 297099 - DNA, 21 bp, Artificial sequence
  SiRNA target sequence
tactacggataaagttcaagc

SEQ ID NO: 297100 - DNA, 21 bp, Artificial sequence
  SiRNA target sequence
actacggataaagttcaagca

SEQ ID NO: 297101 - DNA, 21 bp, Artificial sequence
  SiRNA target sequence
ctacggataaagttcaagcac

SEQ ID NO: 297102 - DNA, 21 bp, Artificial sequence
  SiRNA target sequence
tacggataaagttcaagcacc

SEQ ID NO: 297103 - DNA, 21 bp, Artificial sequence
  SiRNA target sequence
acggataaagttcaagcacca

SEQ ID NO: 297104 - DNA, 21 bp, Artificial sequence
  SiRNA target sequence
cggataaagttcaagcaccaa

SEQ ID NO: 297105 - DNA, 21 bp, Artificial sequence
  SiRNA target sequence
ggataaagttcaagcaccaat

SEQ ID NO: 297106 - DNA, 21 bp, Artificial sequence
  SiRNA target sequence
gataaagttcaagcaccaata

SEQ ID NO: 297107 - DNA, 21 bp, Artificial sequence
  SiRNA target sequence
ataaagttcaagcaccaataa

SEQ ID NO: 297108 - DNA, 21 bp, Artificial sequence
  SiRNA target sequence
taaagttcaagcaccaataag

SEQ ID NO: 297109 - DNA, 21 bp, Artificial sequence
  SiRNA target sequence
aaagttcaagcaccaataagt

SEQ ID NO: 297110 - DNA, 21 bp, Artificial sequence
  SiRNA target sequence
aagttcaagcaccaataagta

SEQ ID NO: 297111 - DNA, 21 bp, Artificial sequence
  SiRNA target sequence
agttcaagcaccaataagtaa

SEQ ID NO: 297112 - DNA, 21 bp, Artificial sequence
  SiRNA target sequence
gttcaagcaccaataagtaat

SEQ ID NO: 297113 - DNA, 21 bp, Artificial sequence
  SiRNA target sequence
ttcaagcaccaataagtaatg

SEQ ID NO: 297114 - DNA, 21 bp, Artificial sequence
  SiRNA target sequence
tcaagcaccaataagtaatgg

SEQ ID NO: 297115 - DNA, 21 bp, Artificial sequence
  SiRNA target sequence
caagcaccaataagtaatgga

SEQ ID NO: 297116 - DNA, 21 bp, Artificial sequence
  SiRNA target sequence
aagcaccaataagtaatggag

SEQ ID NO: 297117 - DNA, 21 bp, Artificial sequence
  SiRNA target sequence
agcaccaataagtaatggaga

SEQ ID NO: 297118 - DNA, 21 bp, Artificial sequence
  SiRNA target sequence
gcaccaataagtaatggagat

SEQ ID NO: 297119 - DNA, 21 bp, Artificial sequence
  SiRNA target sequence
caccaataagtaatggagatg

SEQ ID NO: 297120 - DNA, 21 bp, Artificial sequence
  SiRNA target sequence
accaataagtaatggagatga

SEQ ID NO: 297121 - DNA, 21 bp, Artificial sequence
  SiRNA target sequence
ccaataagtaatggagatgac

SEQ ID NO: 297122 - DNA, 21 bp, Artificial sequence
  SiRNA target sequence
caataagtaatggagatgact

SEQ ID NO: 297123 - DNA, 21 bp, Artificial sequence
  SiRNA target sequence
aataagtaatggagatgactg

SEQ ID NO: 297124 - DNA, 21 bp, Artificial sequence
  SiRNA target sequence
ataagtaatggagatgactgg

SEQ ID NO: 297125 - DNA, 21 bp, Artificial sequence
  SiRNA target sequence
taagtaatggagatgactggg

SEQ ID NO: 297126 - DNA, 21 bp, Artificial sequence
  SiRNA target sequence
aagtaatggagatgactgggg

SEQ ID NO: 297127 - DNA, 21 bp, Artificial sequence
  SiRNA target sequence
agtaatggagatgactgggga

SEQ ID NO: 297128 - DNA, 21 bp, Artificial sequence
  SiRNA target sequence
gtaatggagatgactggggag

SEQ ID NO: 297129 - DNA, 21 bp, Artificial sequence
  SiRNA target sequence
taatggagatgactggggagg

SEQ ID NO: 297130 - DNA, 21 bp, Artificial sequence
  SiRNA target sequence
aatggagatgactggggagga

SEQ ID NO: 297131 - DNA, 21 bp, Artificial sequence
  SiRNA target sequence
atggagatgactggggaggag

SEQ ID NO: 297132 - DNA, 21 bp, Artificial sequence
  SiRNA target sequence
tggagatgactggggaggagt

SEQ ID NO: 297133 - DNA, 21 bp, Artificial sequence
  SiRNA target sequence
ggagatgactggggaggagtg

SEQ ID NO: 297134 - DNA, 21 bp, Artificial sequence
  SiRNA target sequence
gagatgactggggaggagtga

SEQ ID NO: 297135 - DNA, 21 bp, Artificial sequence
  SiRNA target sequence
agatgactggggaggagtgat

SEQ ID NO: 297136 - DNA, 21 bp, Artificial sequence
  SiRNA target sequence
gatgactggggaggagtgata

SEQ ID NO: 297137 - DNA, 21 bp, Artificial sequence
  SiRNA target sequence
atgactggggaggagtgatac

SEQ ID NO: 297138 - DNA, 21 bp, Artificial sequence
  SiRNA target sequence
tgactggggaggagtgatacc

SEQ ID NO: 297139 - DNA, 21 bp, Artificial sequence
  SiRNA target sequence
gactggggaggagtgatacct

SEQ ID NO: 297140 - DNA, 21 bp, Artificial sequence
  SiRNA target sequence
actggggaggagtgatacctg

SEQ ID NO: 297141 - DNA, 21 bp, Artificial sequence
  SiRNA target sequence
ctggggaggagtgatacctgt

SEQ ID NO: 297142 - DNA, 21 bp, Artificial sequence
  SiRNA target sequence
tggggaggagtgatacctgtt

SEQ ID NO: 297143 - DNA, 21 bp, Artificial sequence
  SiRNA target sequence
ggggaggagtgatacctgttg

SEQ ID NO: 297144 - DNA, 21 bp, Artificial sequence
  SiRNA target sequence
gggaggagtgatacctgttgg

SEQ ID NO: 297145 - DNA, 21 bp, Artificial sequence
  SiRNA target sequence
ggaggagtgatacctgttggt

SEQ ID NO: 297146 - DNA, 21 bp, Artificial sequence
  SiRNA target sequence
gaggagtgatacctgttggta

SEQ ID NO: 297147 - DNA, 21 bp, Artificial sequence
  SiRNA target sequence
aggagtgatacctgttggtat

SEQ ID NO: 297148 - DNA, 21 bp, Artificial sequence
  SiRNA target sequence
ggagtgatacctgttggtatg

SEQ ID NO: 297149 - DNA, 21 bp, Artificial sequence
  SiRNA target sequence
gagtgatacctgttggtatgc

SEQ ID NO: 297150 - DNA, 21 bp, Artificial sequence
  SiRNA target sequence
agtgatacctgttggtatgcc

SEQ ID NO: 297151 - DNA, 21 bp, Artificial sequence
  SiRNA target sequence
gtgatacctgttggtatgcca

SEQ ID NO: 297152 - DNA, 21 bp, Artificial sequence
  SiRNA target sequence
tgatacctgttggtatgccat

SEQ ID NO: 297153 - DNA, 21 bp, Artificial sequence
  SiRNA target sequence
gatacctgttggtatgccatg

SEQ ID NO: 297154 - DNA, 21 bp, Artificial sequence
  SiRNA target sequence
atacctgttggtatgccatgt

SEQ ID NO: 297155 - DNA, 21 bp, Artificial sequence
  SiRNA target sequence
tacctgttggtatgccatgtt

SEQ ID NO: 297156 - DNA, 21 bp, Artificial sequence
  SiRNA target sequence
acctgttggtatgccatgtta

SEQ ID NO: 297157 - DNA, 21 bp, Artificial sequence
  SiRNA target sequence
cctgttggtatgccatgttat

SEQ ID NO: 297158 - DNA, 21 bp, Artificial sequence
  SiRNA target sequence
ctgttggtatgccatgttatt

SEQ ID NO: 297159 - DNA, 21 bp, Artificial sequence
  SiRNA target sequence
tgttggtatgccatgttattc

SEQ ID NO: 297160 - DNA, 21 bp, Artificial sequence
  SiRNA target sequence
gttggtatgccatgttattct

SEQ ID NO: 297161 - DNA, 21 bp, Artificial sequence
  SiRNA target sequence
ttggtatgccatgttattcta

SEQ ID NO: 297162 - DNA, 21 bp, Artificial sequence
  SiRNA target sequence
tggtatgccatgttattctaa

SEQ ID NO: 297163 - DNA, 21 bp, Artificial sequence
  SiRNA target sequence
ggtatgccatgttattctaaa

SEQ ID NO: 297164 - DNA, 21 bp, Artificial sequence
  SiRNA target sequence
gtatgccatgttattctaaaa

SEQ ID NO: 297165 - DNA, 21 bp, Artificial sequence
  SiRNA target sequence
tatgccatgttattctaaaat

SEQ ID NO: 297166 - DNA, 21 bp, Artificial sequence
  SiRNA target sequence
atgccatgttattctaaaatc

SEQ ID NO: 297167 - DNA, 21 bp, Artificial sequence
  SiRNA target sequence
tgccatgttattctaaaatca

SEQ ID NO: 297168 - DNA, 21 bp, Artificial sequence
  SiRNA target sequence
gccatgttattctaaaatcat

SEQ ID NO: 297169 - DNA, 21 bp, Artificial sequence
  SiRNA target sequence
ccatgttattctaaaatcata

SEQ ID NO: 297170 - DNA, 21 bp, Artificial sequence
  SiRNA target sequence
catgttattctaaaatcatac

SEQ ID NO: 297171 - DNA, 21 bp, Artificial sequence
  SiRNA target sequence
atgttattctaaaatcatacg

SEQ ID NO: 297172 - DNA, 21 bp, Artificial sequence
  SiRNA target sequence
tgttattctaaaatcatacgg

SEQ ID NO: 297173 - DNA, 21 bp, Artificial sequence
  SiRNA target sequence
gttattctaaaatcatacgga

SEQ ID NO: 297174 - DNA, 21 bp, Artificial sequence
  SiRNA target sequence
ttattctaaaatcatacggac

SEQ ID NO: 297175 - DNA, 21 bp, Artificial sequence
  SiRNA target sequence
tattctaaaatcatacggaca

SEQ ID NO: 297176 - DNA, 21 bp, Artificial sequence
  SiRNA target sequence
attctaaaatcatacggacaa

SEQ ID NO: 297177 - DNA, 21 bp, Artificial sequence
  SiRNA target sequence
ttctaaaatcatacggacaac

SEQ ID NO: 297178 - DNA, 21 bp, Artificial sequence
  SiRNA target sequence
tctaaaatcatacggacaaca

SEQ ID NO: 297179 - DNA, 21 bp, Artificial sequence
  SiRNA target sequence
ctaaaatcatacggacaacag

SEQ ID NO: 297180 - DNA, 21 bp, Artificial sequence
  SiRNA target sequence
taaaatcatacggacaacaga

SEQ ID NO: 297181 - DNA, 21 bp, Artificial sequence
  SiRNA target sequence
aaaatcatacggacaacagag

SEQ ID NO: 297182 - DNA, 21 bp, Artificial sequence
  SiRNA target sequence
aaatcatacggacaacagaga

SEQ ID NO: 297183 - DNA, 21 bp, Artificial sequence
  SiRNA target sequence
aatcatacggacaacagagaa

SEQ ID NO: 297184 - DNA, 21 bp, Artificial sequence
  SiRNA target sequence
atcatacggacaacagagaac

SEQ ID NO: 297185 - DNA, 21 bp, Artificial sequence
  SiRNA target sequence
tcatacggacaacagagaacg

SEQ ID NO: 297186 - DNA, 21 bp, Artificial sequence
  SiRNA target sequence
catacggacaacagagaacga

SEQ ID NO: 297187 - DNA, 21 bp, Artificial sequence
  SiRNA target sequence
atacggacaacagagaacgat

SEQ ID NO: 297188 - DNA, 21 bp, Artificial sequence
  SiRNA target sequence
tacggacaacagagaacgata

SEQ ID NO: 297189 - DNA, 21 bp, Artificial sequence
  SiRNA target sequence
acggacaacagagaacgatac

SEQ ID NO: 297190 - DNA, 21 bp, Artificial sequence
  SiRNA target sequence
cggacaacagagaacgatacg

SEQ ID NO: 297191 - DNA, 21 bp, Artificial sequence
  SiRNA target sequence
ggacaacagagaacgatacga

SEQ ID NO: 297192 - DNA, 21 bp, Artificial sequence
  SiRNA target sequence
gacaacagagaacgatacgac

SEQ ID NO: 297193 - DNA, 21 bp, Artificial sequence
  SiRNA target sequence
acaacagagaacgatacgaca

SEQ ID NO: 297194 - DNA, 21 bp, Artificial sequence
  SiRNA target sequence
caacagagaacgatacgacac

SEQ ID NO: 297195 - DNA, 21 bp, Artificial sequence
  SiRNA target sequence
aacagagaacgatacgacacg

SEQ ID NO: 297196 - DNA, 21 bp, Artificial sequence
  SiRNA target sequence
acagagaacgatacgacacgg

SEQ ID NO: 297197 - DNA, 21 bp, Artificial sequence
  SiRNA target sequence
cagagaacgatacgacacgga

SEQ ID NO: 297198 - DNA, 21 bp, Artificial sequence
  SiRNA target sequence
agagaacgatacgacacggac

SEQ ID NO: 297199 - DNA, 21 bp, Artificial sequence
  SiRNA target sequence
gagaacgatacgacacggact

SEQ ID NO: 297200 - DNA, 21 bp, Artificial sequence
  SiRNA target sequence
agaacgatacgacacggacta

SEQ ID NO: 297201 - DNA, 21 bp, Artificial sequence
  SiRNA target sequence
gaacgatacgacacggactaa

SEQ ID NO: 297202 - DNA, 21 bp, Artificial sequence
  SiRNA target sequence
aacgatacgacacggactaat

SEQ ID NO: 297203 - DNA, 21 bp, Artificial sequence
  SiRNA target sequence
acgatacgacacggactaata

SEQ ID NO: 297204 - DNA, 21 bp, Artificial sequence
  SiRNA target sequence
cgatacgacacggactaatac

SEQ ID NO: 297205 - DNA, 21 bp, Artificial sequence
  SiRNA target sequence
gatacgacacggactaatact

SEQ ID NO: 297206 - DNA, 21 bp, Artificial sequence
  SiRNA target sequence
atacgacacggactaatactg

SEQ ID NO: 297207 - DNA, 21 bp, Artificial sequence
  SiRNA target sequence
tacgacacggactaatactga

SEQ ID NO: 297208 - DNA, 21 bp, Artificial sequence
  SiRNA target sequence
acgacacggactaatactgaa

SEQ ID NO: 297209 - DNA, 21 bp, Artificial sequence
  SiRNA target sequence
cgacacggactaatactgaaa

SEQ ID NO: 297210 - DNA, 21 bp, Artificial sequence
  SiRNA target sequence
gacacggactaatactgaaat

SEQ ID NO: 297211 - DNA, 21 bp, Artificial sequence
  SiRNA target sequence
acacggactaatactgaaatt

SEQ ID NO: 297212 - DNA, 21 bp, Artificial sequence
  SiRNA target sequence
cacggactaatactgaaatta

SEQ ID NO: 297213 - DNA, 21 bp, Artificial sequence
  SiRNA target sequence
acggactaatactgaaattat

SEQ ID NO: 297214 - DNA, 21 bp, Artificial sequence
  SiRNA target sequence
cggactaatactgaaattatg

SEQ ID NO: 297215 - DNA, 21 bp, Artificial sequence
  SiRNA target sequence
ggactaatactgaaattatgg

SEQ ID NO: 297216 - DNA, 21 bp, Artificial sequence
  SiRNA target sequence
gactaatactgaaattatgga

SEQ ID NO: 297217 - DNA, 21 bp, Artificial sequence
  SiRNA target sequence
actaatactgaaattatggat

SEQ ID NO: 297218 - DNA, 21 bp, Artificial sequence
  SiRNA target sequence
ctaatactgaaattatggatc

SEQ ID NO: 297219 - DNA, 21 bp, Artificial sequence
  SiRNA target sequence
taatactgaaattatggatcc

SEQ ID NO: 297220 - DNA, 21 bp, Artificial sequence
  SiRNA target sequence
aatactgaaattatggatcct

SEQ ID NO: 297221 - DNA, 21 bp, Artificial sequence
  SiRNA target sequence
atactgaaattatggatcctg

SEQ ID NO: 297222 - DNA, 21 bp, Artificial sequence
  SiRNA target sequence
tactgaaattatggatcctgc

SEQ ID NO: 297223 - DNA, 21 bp, Artificial sequence
  SiRNA target sequence
actgaaattatggatcctgcc

SEQ ID NO: 297224 - DNA, 21 bp, Artificial sequence
  SiRNA target sequence
ctgaaattatggatcctgccc

SEQ ID NO: 297225 - DNA, 21 bp, Artificial sequence
  SiRNA target sequence
tgaaattatggatcctgcccc

SEQ ID NO: 297226 - DNA, 21 bp, Artificial sequence
  SiRNA target sequence
gaaattatggatcctgcccct

SEQ ID NO: 297227 - DNA, 21 bp, Artificial sequence
  SiRNA target sequence
aaattatggatcctgcccctt

SEQ ID NO: 297228 - DNA, 21 bp, Artificial sequence
  SiRNA target sequence
aattatggatcctgccccttg

SEQ ID NO: 297229 - DNA, 21 bp, Artificial sequence
  SiRNA target sequence
attatggatcctgccccttgt

SEQ ID NO: 297230 - DNA, 21 bp, Artificial sequence
  SiRNA target sequence
ttatggatcctgccccttgtg

SEQ ID NO: 297231 - DNA, 21 bp, Artificial sequence
  SiRNA target sequence
tatggatcctgccccttgtga

SEQ ID NO: 297232 - DNA, 21 bp, Artificial sequence
  SiRNA target sequence
atggatcctgccccttgtgaa

SEQ ID NO: 297233 - DNA, 21 bp, Artificial sequence
  SiRNA target sequence
tggatcctgccccttgtgaat

SEQ ID NO: 297234 - DNA, 21 bp, Artificial sequence
  SiRNA target sequence
ggatcctgccccttgtgaata

SEQ ID NO: 297235 - DNA, 21 bp, Artificial sequence
  SiRNA target sequence
gatcctgccccttgtgaatat

SEQ ID NO: 297236 - DNA, 21 bp, Artificial sequence
  SiRNA target sequence
atcctgccccttgtgaatatg

SEQ ID NO: 297237 - DNA, 21 bp, Artificial sequence
  SiRNA target sequence
tcctgccccttgtgaatatgt

SEQ ID NO: 297238 - DNA, 21 bp, Artificial sequence
  SiRNA target sequence
cctgccccttgtgaatatgtt

SEQ ID NO: 297239 - DNA, 21 bp, Artificial sequence
  SiRNA target sequence
ctgccccttgtgaatatgttt

SEQ ID NO: 297240 - DNA, 21 bp, Artificial sequence
  SiRNA target sequence
tgccccttgtgaatatgtttg

SEQ ID NO: 297241 - DNA, 21 bp, Artificial sequence
  SiRNA target sequence
gccccttgtgaatatgtttgc

SEQ ID NO: 297242 - DNA, 21 bp, Artificial sequence
  SiRNA target sequence
ccccttgtgaatatgtttgca

SEQ ID NO: 297243 - DNA, 21 bp, Artificial sequence
  SiRNA target sequence
cccttgtgaatatgtttgcaa

SEQ ID NO: 297244 - DNA, 21 bp, Artificial sequence
  SiRNA target sequence
ccttgtgaatatgtttgcaat

SEQ ID NO: 297245 - DNA, 21 bp, Artificial sequence
  SiRNA target sequence
cttgtgaatatgtttgcaata

SEQ ID NO: 297246 - DNA, 21 bp, Artificial sequence
  SiRNA target sequence
ttgtgaatatgtttgcaatat

SEQ ID NO: 297247 - DNA, 21 bp, Artificial sequence
  SiRNA target sequence
tgtgaatatgtttgcaatatg

SEQ ID NO: 297248 - DNA, 21 bp, Artificial sequence
  SiRNA target sequence
gtgaatatgtttgcaatatgt

SEQ ID NO: 297249 - DNA, 21 bp, Artificial sequence
  SiRNA target sequence
tgaatatgtttgcaatatgtt

SEQ ID NO: 297250 - DNA, 21 bp, Artificial sequence
  SiRNA target sequence
gaatatgtttgcaatatgttt

SEQ ID NO: 297251 - DNA, 21 bp, Artificial sequence
  SiRNA target sequence
aatatgtttgcaatatgtttt

SEQ ID NO: 297252 - DNA, 21 bp, Artificial sequence
  SiRNA target sequence
atatgtttgcaatatgttttc

SEQ ID NO: 297253 - DNA, 21 bp, Artificial sequence
  SiRNA target sequence
tatgtttgcaatatgttttca

SEQ ID NO: 297254 - DNA, 21 bp, Artificial sequence
  SiRNA target sequence
atgtttgcaatatgttttcat

SEQ ID NO: 297255 - DNA, 21 bp, Artificial sequence
  SiRNA target sequence
tgtttgcaatatgttttcata

SEQ ID NO: 297256 - DNA, 21 bp, Artificial sequence
  SiRNA target sequence
gtttgcaatatgttttcatat

SEQ ID NO: 297257 - DNA, 21 bp, Artificial sequence
  SiRNA target sequence
tttgcaatatgttttcatatt

SEQ ID NO: 297258 - DNA, 21 bp, Artificial sequence
  SiRNA target sequence
ttgcaatatgttttcatattg

SEQ ID NO: 297259 - DNA, 21 bp, Artificial sequence
  SiRNA target sequence
tgcaatatgttttcatattgg

SEQ ID NO: 297260 - DNA, 21 bp, Artificial sequence
  SiRNA target sequence
gcaatatgttttcatattggc

SEQ ID NO: 297261 - DNA, 21 bp, Artificial sequence
  SiRNA target sequence
caatatgttttcatattggcg

SEQ ID NO: 297262 - DNA, 21 bp, Artificial sequence
  SiRNA target sequence
aatatgttttcatattggcga

SEQ ID NO: 297263 - DNA, 21 bp, Artificial sequence
  SiRNA target sequence
atatgttttcatattggcgag

SEQ ID NO: 297264 - DNA, 21 bp, Artificial sequence
  SiRNA target sequence
tatgttttcatattggcgagc

SEQ ID NO: 297265 - DNA, 21 bp, Artificial sequence
  SiRNA target sequence
atgttttcatattggcgagct

SEQ ID NO: 297266 - DNA, 21 bp, Artificial sequence
  SiRNA target sequence
tgttttcatattggcgagcta

SEQ ID NO: 297267 - DNA, 21 bp, Artificial sequence
  SiRNA target sequence
gttttcatattggcgagctac

SEQ ID NO: 297268 - DNA, 21 bp, Artificial sequence
  SiRNA target sequence
ttttcatattggcgagctact

SEQ ID NO: 297269 - DNA, 21 bp, Artificial sequence
  SiRNA target sequence
tttcatattggcgagctacta

SEQ ID NO: 297270 - DNA, 21 bp, Artificial sequence
  SiRNA target sequence
ttcatattggcgagctactat

SEQ ID NO: 297271 - DNA, 21 bp, Artificial sequence
  SiRNA target sequence
tcatattggcgagctactatg

SEQ ID NO: 297272 - DNA, 21 bp, Artificial sequence
  SiRNA target sequence
catattggcgagctactatgt

SEQ ID NO: 297273 - DNA, 21 bp, Artificial sequence
  SiRNA target sequence
atattggcgagctactatgtg

SEQ ID NO: 297274 - DNA, 21 bp, Artificial sequence
  SiRNA target sequence
tattggcgagctactatgtgc

SEQ ID NO: 297275 - DNA, 21 bp, Artificial sequence
  SiRNA target sequence
attggcgagctactatgtgct

SEQ ID NO: 297276 - DNA, 21 bp, Artificial sequence
  SiRNA target sequence
ttggcgagctactatgtgcta

SEQ ID NO: 297277 - DNA, 21 bp, Artificial sequence
  SiRNA target sequence
tggcgagctactatgtgctat

SEQ ID NO: 297278 - DNA, 21 bp, Artificial sequence
  SiRNA target sequence
ggcgagctactatgtgctatc

SEQ ID NO: 297279 - DNA, 21 bp, Artificial sequence
  SiRNA target sequence
gcgagctactatgtgctatcg

SEQ ID NO: 297280 - DNA, 21 bp, Artificial sequence
  SiRNA target sequence
cgagctactatgtgctatcgt

SEQ ID NO: 297281 - DNA, 21 bp, Artificial sequence
  SiRNA target sequence
gagctactatgtgctatcgta

SEQ ID NO: 297282 - DNA, 21 bp, Artificial sequence
  SiRNA target sequence
agctactatgtgctatcgtat

SEQ ID NO: 297283 - DNA, 21 bp, Artificial sequence
  SiRNA target sequence
gctactatgtgctatcgtata

SEQ ID NO: 297284 - DNA, 21 bp, Artificial sequence
  SiRNA target sequence
ctactatgtgctatcgtatag

SEQ ID NO: 297285 - DNA, 21 bp, Artificial sequence
  SiRNA target sequence
tactatgtgctatcgtatagc

SEQ ID NO: 297286 - DNA, 21 bp, Artificial sequence
  SiRNA target sequence
actatgtgctatcgtatagct

SEQ ID NO: 297287 - DNA, 21 bp, Artificial sequence
  SiRNA target sequence
ctatgtgctatcgtatagcta

SEQ ID NO: 297288 - DNA, 21 bp, Artificial sequence
  SiRNA target sequence
tatgtgctatcgtatagctat

SEQ ID NO: 297289 - DNA, 21 bp, Artificial sequence
  SiRNA target sequence
atgtgctatcgtatagctata

SEQ ID NO: 297290 - DNA, 21 bp, Artificial sequence
  SiRNA target sequence
tgtgctatcgtatagctatag

SEQ ID NO: 297291 - DNA, 21 bp, Artificial sequence
  SiRNA target sequence
gtgctatcgtatagctatagt

SEQ ID NO: 297292 - DNA, 21 bp, Artificial sequence
  SiRNA target sequence
tgctatcgtatagctatagtt

SEQ ID NO: 297293 - DNA, 21 bp, Artificial sequence
  SiRNA target sequence
gctatcgtatagctatagtta

SEQ ID NO: 297294 - DNA, 21 bp, Artificial sequence
  SiRNA target sequence
ctatcgtatagctatagttaa

SEQ ID NO: 297295 - DNA, 21 bp, Artificial sequence
  SiRNA target sequence
tatcgtatagctatagttaaa

SEQ ID NO: 297296 - DNA, 21 bp, Artificial sequence
  SiRNA target sequence
atcgtatagctatagttaaaa

SEQ ID NO: 297297 - DNA, 21 bp, Artificial sequence
  SiRNA target sequence
tcgtatagctatagttaaaac

SEQ ID NO: 297298 - DNA, 21 bp, Artificial sequence
  SiRNA target sequence
cgtatagctatagttaaaaca

SEQ ID NO: 297299 - DNA, 21 bp, Artificial sequence
  SiRNA target sequence
gtatagctatagttaaaacag

SEQ ID NO: 297300 - DNA, 21 bp, Artificial sequence
  SiRNA target sequence
tatagctatagttaaaacagc

SEQ ID NO: 297301 - DNA, 21 bp, Artificial sequence
  SiRNA target sequence
atagctatagttaaaacagct

SEQ ID NO: 297302 - DNA, 21 bp, Artificial sequence
  SiRNA target sequence
tagctatagttaaaacagctt

SEQ ID NO: 297303 - DNA, 21 bp, Artificial sequence
  SiRNA target sequence
agctatagttaaaacagcttt

SEQ ID NO: 297304 - DNA, 21 bp, Artificial sequence
  SiRNA target sequence
gctatagttaaaacagctttt

SEQ ID NO: 297305 - DNA, 21 bp, Artificial sequence
  SiRNA target sequence
ctatagttaaaacagcttttc

SEQ ID NO: 297306 - DNA, 21 bp, Artificial sequence
  SiRNA target sequence
tatagttaaaacagcttttca

SEQ ID NO: 297307 - DNA, 21 bp, Artificial sequence
  SiRNA target sequence
atagttaaaacagcttttcac

SEQ ID NO: 297308 - DNA, 21 bp, Artificial sequence
  SiRNA target sequence
tagttaaaacagcttttcaca

SEQ ID NO: 297309 - DNA, 21 bp, Artificial sequence
  SiRNA target sequence
agttaaaacagcttttcacac

SEQ ID NO: 297310 - DNA, 21 bp, Artificial sequence
  SiRNA target sequence
gttaaaacagcttttcacact

SEQ ID NO: 297311 - DNA, 21 bp, Artificial sequence
  SiRNA target sequence
ttaaaacagcttttcacactg

SEQ ID NO: 297312 - DNA, 21 bp, Artificial sequence
  SiRNA target sequence
taaaacagcttttcacactgg

SEQ ID NO: 297313 - DNA, 21 bp, Artificial sequence
  SiRNA target sequence
aaaacagcttttcacactggt

SEQ ID NO: 297314 - DNA, 21 bp, Artificial sequence
  SiRNA target sequence
aaacagcttttcacactggta

SEQ ID NO: 297315 - DNA, 21 bp, Artificial sequence
  SiRNA target sequence
aacagcttttcacactggtag

SEQ ID NO: 297316 - DNA, 21 bp, Artificial sequence
  SiRNA target sequence
acagcttttcacactggtagg

SEQ ID NO: 297317 - DNA, 21 bp, Artificial sequence
  SiRNA target sequence
cagcttttcacactggtaggt

SEQ ID NO: 297318 - DNA, 21 bp, Artificial sequence
  SiRNA target sequence
agcttttcacactggtaggtt

SEQ ID NO: 297319 - DNA, 21 bp, Artificial sequence
  SiRNA target sequence
gcttttcacactggtaggtta

SEQ ID NO: 297320 - DNA, 21 bp, Artificial sequence
  SiRNA target sequence
cttttcacactggtaggttag

SEQ ID NO: 297321 - DNA, 21 bp, Artificial sequence
  SiRNA target sequence
ttttcacactggtaggttagg

SEQ ID NO: 297322 - DNA, 21 bp, Artificial sequence
  SiRNA target sequence
tttcacactggtaggttagga

SEQ ID NO: 297323 - DNA, 21 bp, Artificial sequence
  SiRNA target sequence
ttcacactggtaggttaggaa

SEQ ID NO: 297324 - DNA, 21 bp, Artificial sequence
  SiRNA target sequence
tcacactggtaggttaggaat

SEQ ID NO: 297325 - DNA, 21 bp, Artificial sequence
  SiRNA target sequence
cacactggtaggttaggaatt

SEQ ID NO: 297326 - DNA, 21 bp, Artificial sequence
  SiRNA target sequence
acactggtaggttaggaattt

SEQ ID NO: 297327 - DNA, 21 bp, Artificial sequence
  SiRNA target sequence
cactggtaggttaggaatttt

SEQ ID NO: 297328 - DNA, 21 bp, Artificial sequence
  SiRNA target sequence
actggtaggttaggaattttc

SEQ ID NO: 297329 - DNA, 21 bp, Artificial sequence
  SiRNA target sequence
ctggtaggttaggaattttct

SEQ ID NO: 297330 - DNA, 21 bp, Artificial sequence
  SiRNA target sequence
tggtaggttaggaattttctt

SEQ ID NO: 297331 - DNA, 21 bp, Artificial sequence
  SiRNA target sequence
ggtaggttaggaattttcttc

SEQ ID NO: 297332 - DNA, 21 bp, Artificial sequence
  SiRNA target sequence
gtaggttaggaattttcttcg

SEQ ID NO: 297333 - DNA, 21 bp, Artificial sequence
  SiRNA target sequence
taggttaggaattttcttcgg

SEQ ID NO: 297334 - DNA, 21 bp, Artificial sequence
  SiRNA target sequence
aggttaggaattttcttcgga

SEQ ID NO: 297335 - DNA, 21 bp, Artificial sequence
  SiRNA target sequence
ggttaggaattttcttcggac

SEQ ID NO: 297336 - DNA, 21 bp, Artificial sequence
  SiRNA target sequence
gttaggaattttcttcggacc

SEQ ID NO: 297337 - DNA, 21 bp, Artificial sequence
  SiRNA target sequence
ttaggaattttcttcggacct

SEQ ID NO: 297338 - DNA, 21 bp, Artificial sequence
  SiRNA target sequence
taggaattttcttcggacctg

SEQ ID NO: 297339 - DNA, 21 bp, Artificial sequence
  SiRNA target sequence
aggaattttcttcggacctgg

SEQ ID NO: 297340 - DNA, 21 bp, Artificial sequence
  SiRNA target sequence
ggaattttcttcggacctggt

SEQ ID NO: 297341 - DNA, 21 bp, Artificial sequence
  SiRNA target sequence
gaattttcttcggacctggta

SEQ ID NO: 297342 - DNA, 21 bp, Artificial sequence
  SiRNA target sequence
aattttcttcggacctggtaa

SEQ ID NO: 297343 - DNA, 21 bp, Artificial sequence
  SiRNA target sequence
attttcttcggacctggtaag

SEQ ID NO: 297344 - DNA, 21 bp, Artificial sequence
  SiRNA target sequence
ttttcttcggacctggtaaga

SEQ ID NO: 297345 - DNA, 21 bp, Artificial sequence
  SiRNA target sequence
tttcttcggacctggtaagat

SEQ ID NO: 297346 - DNA, 21 bp, Artificial sequence
  SiRNA target sequence
ttcttcggacctggtaagatt

SEQ ID NO: 297347 - DNA, 21 bp, Artificial sequence
  SiRNA target sequence
tcttcggacctggtaagattc

SEQ ID NO: 297348 - DNA, 21 bp, Artificial sequence
  SiRNA target sequence
cttcggacctggtaagattcc

SEQ ID NO: 297349 - DNA, 21 bp, Artificial sequence
  SiRNA target sequence
ttcggacctggtaagattcca

SEQ ID NO: 297350 - DNA, 21 bp, Artificial sequence
  SiRNA target sequence
tcggacctggtaagattccaa

SEQ ID NO: 297351 - DNA, 21 bp, Artificial sequence
  SiRNA target sequence
cggacctggtaagattccaat

SEQ ID NO: 297352 - DNA, 21 bp, Artificial sequence
  SiRNA target sequence
ggacctggtaagattccaata

SEQ ID NO: 297353 - DNA, 21 bp, Artificial sequence
  SiRNA target sequence
gacctggtaagattccaataa

SEQ ID NO: 297354 - DNA, 21 bp, Artificial sequence
  SiRNA target sequence
acctggtaagattccaataac

SEQ ID NO: 297355 - DNA, 21 bp, Artificial sequence
  SiRNA target sequence
cctggtaagattccaataacg

SEQ ID NO: 297356 - DNA, 21 bp, Artificial sequence
  SiRNA target sequence
ctggtaagattccaataacga

SEQ ID NO: 297357 - DNA, 21 bp, Artificial sequence
  SiRNA target sequence
tggtaagattccaataacgac

SEQ ID NO: 297358 - DNA, 21 bp, Artificial sequence
  SiRNA target sequence
ggtaagattccaataacgacg

SEQ ID NO: 297359 - DNA, 21 bp, Artificial sequence
  SiRNA target sequence
gtaagattccaataacgacga

SEQ ID NO: 297360 - DNA, 21 bp, Artificial sequence
  SiRNA target sequence
taagattccaataacgacgac

SEQ ID NO: 297361 - DNA, 21 bp, Artificial sequence
  SiRNA target sequence
aagattccaataacgacgacg

SEQ ID NO: 297362 - DNA, 21 bp, Artificial sequence
  SiRNA target sequence
agattccaataacgacgacga

SEQ ID NO: 297363 - DNA, 21 bp, Artificial sequence
  SiRNA target sequence
gattccaataacgacgacgaa

SEQ ID NO: 297364 - DNA, 21 bp, Artificial sequence
  SiRNA target sequence
attccaataacgacgacgaaa

SEQ ID NO: 297365 - DNA, 21 bp, Artificial sequence
  SiRNA target sequence
ttccaataacgacgacgaaag

SEQ ID NO: 297366 - DNA, 21 bp, Artificial sequence
  SiRNA target sequence
tccaataacgacgacgaaaga

SEQ ID NO: 297367 - DNA, 21 bp, Artificial sequence
  SiRNA target sequence
ccaataacgacgacgaaagat

SEQ ID NO: 297368 - DNA, 21 bp, Artificial sequence
  SiRNA target sequence
caataacgacgacgaaagata

SEQ ID NO: 297369 - DNA, 21 bp, Artificial sequence
  SiRNA target sequence
aataacgacgacgaaagataa

SEQ ID NO: 297370 - DNA, 21 bp, Artificial sequence
  SiRNA target sequence
ataacgacgacgaaagataat

SEQ ID NO: 297371 - DNA, 21 bp, Artificial sequence
  SiRNA target sequence
taacgacgacgaaagataata

SEQ ID NO: 297372 - DNA, 21 bp, Artificial sequence
  SiRNA target sequence
aacgacgacgaaagataatat

SEQ ID NO: 297373 - DNA, 21 bp, Artificial sequence
  SiRNA target sequence
acgacgacgaaagataatatt

SEQ ID NO: 297374 - DNA, 21 bp, Artificial sequence
  SiRNA target sequence
cgacgacgaaagataatattt

SEQ ID NO: 297375 - DNA, 21 bp, Artificial sequence
  SiRNA target sequence
gacgacgaaagataatatttc

SEQ ID NO: 297376 - DNA, 21 bp, Artificial sequence
  SiRNA target sequence
acgacgaaagataatatttcc

SEQ ID NO: 297377 - DNA, 21 bp, Artificial sequence
  SiRNA target sequence
cgacgaaagataatatttccc

SEQ ID NO: 297378 - DNA, 21 bp, Artificial sequence
  SiRNA target sequence
gacgaaagataatatttcccc

SEQ ID NO: 297379 - DNA, 21 bp, Artificial sequence
  SiRNA target sequence
acgaaagataatatttccccg

SEQ ID NO: 297380 - DNA, 21 bp, Artificial sequence
  SiRNA target sequence
cgaaagataatatttccccgg

SEQ ID NO: 297381 - DNA, 21 bp, Artificial sequence
  SiRNA target sequence
gaaagataatatttccccgga

SEQ ID NO: 297382 - DNA, 21 bp, Artificial sequence
  SiRNA target sequence
aaagataatatttccccggac

SEQ ID NO: 297383 - DNA, 21 bp, Artificial sequence
  SiRNA target sequence
aagataatatttccccggact

SEQ ID NO: 297384 - DNA, 21 bp, Artificial sequence
  SiRNA target sequence
agataatatttccccggactt

SEQ ID NO: 297385 - DNA, 21 bp, Artificial sequence
  SiRNA target sequence
gataatatttccccggacttg

SEQ ID NO: 297386 - DNA, 21 bp, Artificial sequence
  SiRNA target sequence
ataatatttccccggacttga

SEQ ID NO: 297387 - DNA, 21 bp, Artificial sequence
  SiRNA target sequence
taatatttccccggacttgac

SEQ ID NO: 297388 - DNA, 21 bp, Artificial sequence
  SiRNA target sequence
aatatttccccggacttgact

SEQ ID NO: 297389 - DNA, 21 bp, Artificial sequence
  SiRNA target sequence
atatttccccggacttgactc

SEQ ID NO: 297390 - DNA, 21 bp, Artificial sequence
  SiRNA target sequence
tatttccccggacttgactca

SEQ ID NO: 297391 - DNA, 21 bp, Artificial sequence
  SiRNA target sequence
atttccccggacttgactcag

SEQ ID NO: 297392 - DNA, 21 bp, Artificial sequence
  SiRNA target sequence
tttccccggacttgactcagt

SEQ ID NO: 297393 - DNA, 21 bp, Artificial sequence
  SiRNA target sequence
ttccccggacttgactcagtt

SEQ ID NO: 297394 - DNA, 21 bp, Artificial sequence
  SiRNA target sequence
tccccggacttgactcagtta

SEQ ID NO: 297395 - DNA, 21 bp, Artificial sequence
  SiRNA target sequence
ccccggacttgactcagttag

SEQ ID NO: 297396 - DNA, 21 bp, Artificial sequence
  SiRNA target sequence
cccggacttgactcagttaga

SEQ ID NO: 297397 - DNA, 21 bp, Artificial sequence
  SiRNA target sequence
ccggacttgactcagttagat

SEQ ID NO: 297398 - DNA, 21 bp, Artificial sequence
  SiRNA target sequence
cggacttgactcagttagatg

SEQ ID NO: 297399 - DNA, 21 bp, Artificial sequence
  SiRNA target sequence
ggacttgactcagttagatgg

SEQ ID NO: 297400 - DNA, 21 bp, Artificial sequence
  SiRNA target sequence
gacttgactcagttagatgga

SEQ ID NO: 297401 - DNA, 21 bp, Artificial sequence
  SiRNA target sequence
acttgactcagttagatggaa

SEQ ID NO: 297402 - DNA, 21 bp, Artificial sequence
  SiRNA target sequence
cttgactcagttagatggaat

SEQ ID NO: 297403 - DNA, 21 bp, Artificial sequence
  SiRNA target sequence
ttgactcagttagatggaatt

SEQ ID NO: 297404 - DNA, 21 bp, Artificial sequence
  SiRNA target sequence
tgactcagttagatggaatta

SEQ ID NO: 297405 - DNA, 21 bp, Artificial sequence
  SiRNA target sequence
gactcagttagatggaattaa

SEQ ID NO: 297406 - DNA, 21 bp, Artificial sequence
  SiRNA target sequence
actcagttagatggaattaaa

SEQ ID NO: 297407 - DNA, 21 bp, Artificial sequence
  SiRNA target sequence
ctcagttagatggaattaaag

SEQ ID NO: 297408 - DNA, 21 bp, Artificial sequence
  SiRNA target sequence
tcagttagatggaattaaagc

SEQ ID NO: 297409 - DNA, 21 bp, Artificial sequence
  SiRNA target sequence
cagttagatggaattaaagcg

SEQ ID NO: 297410 - DNA, 21 bp, Artificial sequence
  SiRNA target sequence
agttagatggaattaaagcgc

SEQ ID NO: 297411 - DNA, 21 bp, Artificial sequence
  SiRNA target sequence
gttagatggaattaaagcgcc

SEQ ID NO: 297412 - DNA, 21 bp, Artificial sequence
  SiRNA target sequence
ttagatggaattaaagcgcct

SEQ ID NO: 297413 - DNA, 21 bp, Artificial sequence
  SiRNA target sequence
tagatggaattaaagcgcctt

SEQ ID NO: 297414 - DNA, 21 bp, Artificial sequence
  SiRNA target sequence
agatggaattaaagcgccttc

SEQ ID NO: 297415 - DNA, 21 bp, Artificial sequence
  SiRNA target sequence
gatggaattaaagcgccttct

SEQ ID NO: 297416 - DNA, 21 bp, Artificial sequence
  SiRNA target sequence
atggaattaaagcgccttctg

SEQ ID NO: 297417 - DNA, 21 bp, Artificial sequence
  SiRNA target sequence
tggaattaaagcgccttctga

SEQ ID NO: 297418 - DNA, 21 bp, Artificial sequence
  SiRNA target sequence
ggaattaaagcgccttctgat

SEQ ID NO: 297419 - DNA, 21 bp, Artificial sequence
  SiRNA target sequence
gaattaaagcgccttctgata

SEQ ID NO: 297420 - DNA, 21 bp, Artificial sequence
  SiRNA target sequence
aattaaagcgccttctgataa

SEQ ID NO: 297421 - DNA, 21 bp, Artificial sequence
  SiRNA target sequence
attaaagcgccttctgataac

SEQ ID NO: 297422 - DNA, 21 bp, Artificial sequence
  SiRNA target sequence
ttaaagcgccttctgataaca

SEQ ID NO: 297423 - DNA, 21 bp, Artificial sequence
  SiRNA target sequence
taaagcgccttctgataacaa

SEQ ID NO: 297424 - DNA, 21 bp, Artificial sequence
  SiRNA target sequence
aaagcgccttctgataacaat

SEQ ID NO: 297425 - DNA, 21 bp, Artificial sequence
  SiRNA target sequence
aagcgccttctgataacaatt

SEQ ID NO: 297426 - DNA, 21 bp, Artificial sequence
  SiRNA target sequence
agcgccttctgataacaatta

SEQ ID NO: 297427 - DNA, 21 bp, Artificial sequence
  SiRNA target sequence
gcgccttctgataacaattac

SEQ ID NO: 297428 - DNA, 21 bp, Artificial sequence
  SiRNA target sequence
cgccttctgataacaattaca

SEQ ID NO: 297429 - DNA, 21 bp, Artificial sequence
  SiRNA target sequence
gccttctgataacaattacaa

SEQ ID NO: 297430 - DNA, 21 bp, Artificial sequence
  SiRNA target sequence
ccttctgataacaattacaaa

SEQ ID NO: 297431 - DNA, 21 bp, Artificial sequence
  SiRNA target sequence
cttctgataacaattacaaat

SEQ ID NO: 297432 - DNA, 21 bp, Artificial sequence
  SiRNA target sequence
ttctgataacaattacaaata

SEQ ID NO: 297433 - DNA, 21 bp, Artificial sequence
  SiRNA target sequence
tctgataacaattacaaatac

SEQ ID NO: 297434 - DNA, 21 bp, Artificial sequence
  SiRNA target sequence
ctgataacaattacaaataca

SEQ ID NO: 297435 - DNA, 21 bp, Artificial sequence
  SiRNA target sequence
tgataacaattacaaatacat

SEQ ID NO: 297436 - DNA, 21 bp, Artificial sequence
  SiRNA target sequence
gataacaattacaaatacatc

SEQ ID NO: 297437 - DNA, 21 bp, Artificial sequence
  SiRNA target sequence
ataacaattacaaatacatct

SEQ ID NO: 297438 - DNA, 21 bp, Artificial sequence
  SiRNA target sequence
taacaattacaaatacatctt

SEQ ID NO: 297439 - DNA, 21 bp, Artificial sequence
  SiRNA target sequence
aacaattacaaatacatcttg

SEQ ID NO: 297440 - DNA, 21 bp, Artificial sequence
  SiRNA target sequence
acaattacaaatacatcttgg

SEQ ID NO: 297441 - DNA, 21 bp, Artificial sequence
  SiRNA target sequence
caattacaaatacatcttgga

SEQ ID NO: 297442 - DNA, 21 bp, Artificial sequence
  SiRNA target sequence
aattacaaatacatcttggat

SEQ ID NO: 297443 - DNA, 21 bp, Artificial sequence
  SiRNA target sequence
attacaaatacatcttggatc

SEQ ID NO: 297444 - DNA, 21 bp, Artificial sequence
  SiRNA target sequence
ttacaaatacatcttggatct

SEQ ID NO: 297445 - DNA, 21 bp, Artificial sequence
  SiRNA target sequence
tacaaatacatcttggatcta

SEQ ID NO: 297446 - DNA, 21 bp, Artificial sequence
  SiRNA target sequence
acaaatacatcttggatctaa

SEQ ID NO: 297447 - DNA, 21 bp, Artificial sequence
  SiRNA target sequence
caaatacatcttggatctaac

SEQ ID NO: 297448 - DNA, 21 bp, Artificial sequence
  SiRNA target sequence
aaatacatcttggatctaact

SEQ ID NO: 297449 - DNA, 21 bp, Artificial sequence
  SiRNA target sequence
aatacatcttggatctaacta

SEQ ID NO: 297450 - DNA, 21 bp, Artificial sequence
  SiRNA target sequence
atacatcttggatctaactaa

SEQ ID NO: 297451 - DNA, 21 bp, Artificial sequence
  SiRNA target sequence
tacatcttggatctaactaat

SEQ ID NO: 297452 - DNA, 21 bp, Artificial sequence
  SiRNA target sequence
acatcttggatctaactaatg

SEQ ID NO: 297453 - DNA, 21 bp, Artificial sequence
  SiRNA target sequence
catcttggatctaactaatga

SEQ ID NO: 297454 - DNA, 21 bp, Artificial sequence
  SiRNA target sequence
atcttggatctaactaatgat

SEQ ID NO: 297455 - DNA, 21 bp, Artificial sequence
  SiRNA target sequence
tcttggatctaactaatgata

SEQ ID NO: 297456 - DNA, 21 bp, Artificial sequence
  SiRNA target sequence
cttggatctaactaatgatac

SEQ ID NO: 297457 - DNA, 21 bp, Artificial sequence
  SiRNA target sequence
ttggatctaactaatgatacg

SEQ ID NO: 297458 - DNA, 21 bp, Artificial sequence
  SiRNA target sequence
tggatctaactaatgatacgg

SEQ ID NO: 297459 - DNA, 21 bp, Artificial sequence
  SiRNA target sequence
ggatctaactaatgatacgga

SEQ ID NO: 297460 - DNA, 21 bp, Artificial sequence
  SiRNA target sequence
gatctaactaatgatacggag

SEQ ID NO: 297461 - DNA, 21 bp, Artificial sequence
  SiRNA target sequence
atctaactaatgatacggaga

SEQ ID NO: 297462 - DNA, 21 bp, Artificial sequence
  SiRNA target sequence
tctaactaatgatacggagat

SEQ ID NO: 297463 - DNA, 21 bp, Artificial sequence
  SiRNA target sequence
ctaactaatgatacggagatc

SEQ ID NO: 297464 - DNA, 21 bp, Artificial sequence
  SiRNA target sequence
taactaatgatacggagatca

SEQ ID NO: 297465 - DNA, 21 bp, Artificial sequence
  SiRNA target sequence
aactaatgatacggagatcac

SEQ ID NO: 297466 - DNA, 21 bp, Artificial sequence
  SiRNA target sequence
actaatgatacggagatcacc

SEQ ID NO: 297467 - DNA, 21 bp, Artificial sequence
  SiRNA target sequence
ctaatgatacggagatcacca

SEQ ID NO: 297468 - DNA, 21 bp, Artificial sequence
  SiRNA target sequence
taatgatacggagatcaccat

SEQ ID NO: 297469 - DNA, 21 bp, Artificial sequence
  SiRNA target sequence
aatgatacggagatcaccata

SEQ ID NO: 297470 - DNA, 21 bp, Artificial sequence
  SiRNA target sequence
atgatacggagatcaccataa

SEQ ID NO: 297471 - DNA, 21 bp, Artificial sequence
  SiRNA target sequence
tgatacggagatcaccataag

SEQ ID NO: 297472 - DNA, 21 bp, Artificial sequence
  SiRNA target sequence
gatacggagatcaccataagg

SEQ ID NO: 297473 - DNA, 21 bp, Artificial sequence
  SiRNA target sequence
atacggagatcaccataaggg

SEQ ID NO: 297474 - DNA, 21 bp, Artificial sequence
  SiRNA target sequence
tacggagatcaccataagggt

SEQ ID NO: 297475 - DNA, 21 bp, Artificial sequence
  SiRNA target sequence
acggagatcaccataagggta

SEQ ID NO: 297476 - DNA, 21 bp, Artificial sequence
  SiRNA target sequence
cggagatcaccataagggtac

SEQ ID NO: 297477 - DNA, 21 bp, Artificial sequence
  SiRNA target sequence
ggagatcaccataagggtacc

SEQ ID NO: 297478 - DNA, 21 bp, Artificial sequence
  SiRNA target sequence
gagatcaccataagggtacct

SEQ ID NO: 297479 - DNA, 21 bp, Artificial sequence
  SiRNA target sequence
agatcaccataagggtacctt

SEQ ID NO: 297480 - DNA, 21 bp, Artificial sequence
  SiRNA target sequence
gatcaccataagggtaccttt

SEQ ID NO: 297481 - DNA, 21 bp, Artificial sequence
  SiRNA target sequence
atcaccataagggtacctttt

SEQ ID NO: 297482 - DNA, 21 bp, Artificial sequence
  SiRNA target sequence
tcaccataagggtaccttttg

SEQ ID NO: 297483 - DNA, 21 bp, Artificial sequence
  SiRNA target sequence
caccataagggtaccttttgt

SEQ ID NO: 297484 - DNA, 21 bp, Artificial sequence
  SiRNA target sequence
accataagggtaccttttgtt

SEQ ID NO: 297485 - DNA, 21 bp, Artificial sequence
  SiRNA target sequence
ccataagggtaccttttgttt

SEQ ID NO: 297486 - DNA, 21 bp, Artificial sequence
  SiRNA target sequence
cataagggtaccttttgtttc

SEQ ID NO: 297487 - DNA, 21 bp, Artificial sequence
  SiRNA target sequence
ataagggtaccttttgtttca

SEQ ID NO: 297488 - DNA, 21 bp, Artificial sequence
  SiRNA target sequence
taagggtaccttttgtttcaa

SEQ ID NO: 297489 - DNA, 21 bp, Artificial sequence
  SiRNA target sequence
aagggtaccttttgtttcaaa

SEQ ID NO: 297490 - DNA, 21 bp, Artificial sequence
  SiRNA target sequence
agggtaccttttgtttcaaac

SEQ ID NO: 297491 - DNA, 21 bp, Artificial sequence
  SiRNA target sequence
gggtaccttttgtttcaaaca

SEQ ID NO: 297492 - DNA, 21 bp, Artificial sequence
  SiRNA target sequence
ggtaccttttgtttcaaacaa

SEQ ID NO: 297493 - DNA, 21 bp, Artificial sequence
  SiRNA target sequence
gtaccttttgtttcaaacaaa

SEQ ID NO: 297494 - DNA, 21 bp, Artificial sequence
  SiRNA target sequence
taccttttgtttcaaacaaaa

SEQ ID NO: 297495 - DNA, 21 bp, Artificial sequence
  SiRNA target sequence
accttttgtttcaaacaaaat

SEQ ID NO: 297496 - DNA, 21 bp, Artificial sequence
  SiRNA target sequence
ccttttgtttcaaacaaaatg

SEQ ID NO: 297497 - DNA, 21 bp, Artificial sequence
  SiRNA target sequence
cttttgtttcaaacaaaatgt

SEQ ID NO: 297498 - DNA, 21 bp, Artificial sequence
  SiRNA target sequence
ttttgtttcaaacaaaatgtt

SEQ ID NO: 297499 - DNA, 21 bp, Artificial sequence
  SiRNA target sequence
tttgtttcaaacaaaatgttc

SEQ ID NO: 297500 - DNA, 21 bp, Artificial sequence
  SiRNA target sequence
ttgtttcaaacaaaatgttca

SEQ ID NO: 297501 - DNA, 21 bp, Artificial sequence
  SiRNA target sequence
tgtttcaaacaaaatgttcat

SEQ ID NO: 297502 - DNA, 21 bp, Artificial sequence
  SiRNA target sequence
gtttcaaacaaaatgttcatg

SEQ ID NO: 297503 - DNA, 21 bp, Artificial sequence
  SiRNA target sequence
tttcaaacaaaatgttcatga

SEQ ID NO: 297504 - DNA, 21 bp, Artificial sequence
  SiRNA target sequence
ttcaaacaaaatgttcatgaa

SEQ ID NO: 297505 - DNA, 21 bp, Artificial sequence
  SiRNA target sequence
tcaaacaaaatgttcatgaaa

SEQ ID NO: 297506 - DNA, 21 bp, Artificial sequence
  SiRNA target sequence
caaacaaaatgttcatgaaat

SEQ ID NO: 297507 - DNA, 21 bp, Artificial sequence
  SiRNA target sequence
aaacaaaatgttcatgaaatc

SEQ ID NO: 297508 - DNA, 21 bp, Artificial sequence
  SiRNA target sequence
aacaaaatgttcatgaaatct

SEQ ID NO: 297509 - DNA, 21 bp, Artificial sequence
  SiRNA target sequence
acaaaatgttcatgaaatcta

SEQ ID NO: 297510 - DNA, 21 bp, Artificial sequence
  SiRNA target sequence
caaaatgttcatgaaatctac

SEQ ID NO: 297511 - DNA, 21 bp, Artificial sequence
  SiRNA target sequence
aaaatgttcatgaaatctacg

SEQ ID NO: 297512 - DNA, 21 bp, Artificial sequence
  SiRNA target sequence
aaatgttcatgaaatctacgg

SEQ ID NO: 297513 - DNA, 21 bp, Artificial sequence
  SiRNA target sequence
aatgttcatgaaatctacggg

SEQ ID NO: 297514 - DNA, 21 bp, Artificial sequence
  SiRNA target sequence
atgttcatgaaatctacggga

SEQ ID NO: 297515 - DNA, 21 bp, Artificial sequence
  SiRNA target sequence
tgttcatgaaatctacgggaa

SEQ ID NO: 297516 - DNA, 21 bp, Artificial sequence
  SiRNA target sequence
gttcatgaaatctacgggaat

SEQ ID NO: 297517 - DNA, 21 bp, Artificial sequence
  SiRNA target sequence
ttcatgaaatctacgggaatt

SEQ ID NO: 297518 - DNA, 21 bp, Artificial sequence
  SiRNA target sequence
tcatgaaatctacgggaattt

SEQ ID NO: 297519 - DNA, 21 bp, Artificial sequence
  SiRNA target sequence
catgaaatctacgggaattta

SEQ ID NO: 297520 - DNA, 21 bp, Artificial sequence
  SiRNA target sequence
atgaaatctacgggaatttat

SEQ ID NO: 297521 - DNA, 21 bp, Artificial sequence
  SiRNA target sequence
tgaaatctacgggaatttatg

SEQ ID NO: 297522 - DNA, 21 bp, Artificial sequence
  SiRNA target sequence
gaaatctacgggaatttatgg

SEQ ID NO: 297523 - DNA, 21 bp, Artificial sequence
  SiRNA target sequence
aaatctacgggaatttatggt

SEQ ID NO: 297524 - DNA, 21 bp, Artificial sequence
  SiRNA target sequence
aatctacgggaatttatggtg

SEQ ID NO: 297525 - DNA, 21 bp, Artificial sequence
  SiRNA target sequence
atctacgggaatttatggtgg

SEQ ID NO: 297526 - DNA, 21 bp, Artificial sequence
  SiRNA target sequence
tctacgggaatttatggtgga

SEQ ID NO: 297527 - DNA, 21 bp, Artificial sequence
  SiRNA target sequence
ctacgggaatttatggtggaa

SEQ ID NO: 297528 - DNA, 21 bp, Artificial sequence
  SiRNA target sequence
tacgggaatttatggtggaaa

SEQ ID NO: 297529 - DNA, 21 bp, Artificial sequence
  SiRNA target sequence
acgggaatttatggtggaaat

SEQ ID NO: 297530 - DNA, 21 bp, Artificial sequence
  SiRNA target sequence
cgggaatttatggtggaaatt

SEQ ID NO: 297531 - DNA, 21 bp, Artificial sequence
  SiRNA target sequence
gggaatttatggtggaaattc

SEQ ID NO: 297532 - DNA, 21 bp, Artificial sequence
  SiRNA target sequence
ggaatttatggtggaaattct

SEQ ID NO: 297533 - DNA, 21 bp, Artificial sequence
  SiRNA target sequence
gaatttatggtggaaattctg

SEQ ID NO: 297534 - DNA, 21 bp, Artificial sequence
  SiRNA target sequence
aatttatggtggaaattctga

SEQ ID NO: 297535 - DNA, 21 bp, Artificial sequence
  SiRNA target sequence
atttatggtggaaattctgaa

SEQ ID NO: 297536 - DNA, 21 bp, Artificial sequence
  SiRNA target sequence
tttatggtggaaattctgaaa

SEQ ID NO: 297537 - DNA, 21 bp, Artificial sequence
  SiRNA target sequence
ttatggtggaaattctgaaaa

SEQ ID NO: 297538 - DNA, 21 bp, Artificial sequence
  SiRNA target sequence
tatggtggaaattctgaaaat

SEQ ID NO: 297539 - DNA, 21 bp, Artificial sequence
  SiRNA target sequence
atggtggaaattctgaaaata

SEQ ID NO: 297540 - DNA, 21 bp, Artificial sequence
  SiRNA target sequence
tggtggaaattctgaaaataa

SEQ ID NO: 297541 - DNA, 21 bp, Artificial sequence
  SiRNA target sequence
ggtggaaattctgaaaataat

SEQ ID NO: 297542 - DNA, 21 bp, Artificial sequence
  SiRNA target sequence
gtggaaattctgaaaataatt

SEQ ID NO: 297543 - DNA, 21 bp, Artificial sequence
  SiRNA target sequence
tggaaattctgaaaataattg

SEQ ID NO: 297544 - DNA, 21 bp, Artificial sequence
  SiRNA target sequence
ggaaattctgaaaataattgg

SEQ ID NO: 297545 - DNA, 21 bp, Artificial sequence
  SiRNA target sequence
gaaattctgaaaataattggg

SEQ ID NO: 297546 - DNA, 21 bp, Artificial sequence
  SiRNA target sequence
aaattctgaaaataattggga

SEQ ID NO: 297547 - DNA, 21 bp, Artificial sequence
  SiRNA target sequence
aattctgaaaataattgggat

SEQ ID NO: 297548 - DNA, 21 bp, Artificial sequence
  SiRNA target sequence
attctgaaaataattgggatt

SEQ ID NO: 297549 - DNA, 21 bp, Artificial sequence
  SiRNA target sequence
ttctgaaaataattgggattt

SEQ ID NO: 297550 - DNA, 21 bp, Artificial sequence
  SiRNA target sequence
tctgaaaataattgggatttc

SEQ ID NO: 297551 - DNA, 21 bp, Artificial sequence
  SiRNA target sequence
ctgaaaataattgggatttct

SEQ ID NO: 297552 - DNA, 21 bp, Artificial sequence
  SiRNA target sequence
tgaaaataattgggatttctc

SEQ ID NO: 297553 - DNA, 21 bp, Artificial sequence
  SiRNA target sequence
gaaaataattgggatttctct

SEQ ID NO: 297554 - DNA, 21 bp, Artificial sequence
  SiRNA target sequence
aaaataattgggatttctctg

SEQ ID NO: 297555 - DNA, 21 bp, Artificial sequence
  SiRNA target sequence
aaataattgggatttctctga

SEQ ID NO: 297556 - DNA, 21 bp, Artificial sequence
  SiRNA target sequence
aataattgggatttctctgaa

SEQ ID NO: 297557 - DNA, 21 bp, Artificial sequence
  SiRNA target sequence
ataattgggatttctctgaat

SEQ ID NO: 297558 - DNA, 21 bp, Artificial sequence
  SiRNA target sequence
taattgggatttctctgaatc

SEQ ID NO: 297559 - DNA, 21 bp, Artificial sequence
  SiRNA target sequence
aattgggatttctctgaatca

SEQ ID NO: 297560 - DNA, 21 bp, Artificial sequence
  SiRNA target sequence
attgggatttctctgaatcat

SEQ ID NO: 297561 - DNA, 21 bp, Artificial sequence
  SiRNA target sequence
ttgggatttctctgaatcatt

SEQ ID NO: 297562 - DNA, 21 bp, Artificial sequence
  SiRNA target sequence
tgggatttctctgaatcattt

SEQ ID NO: 297563 - DNA, 21 bp, Artificial sequence
  SiRNA target sequence
gggatttctctgaatcattta

SEQ ID NO: 297564 - DNA, 21 bp, Artificial sequence
  SiRNA target sequence
ggatttctctgaatcatttac

SEQ ID NO: 297565 - DNA, 21 bp, Artificial sequence
  SiRNA target sequence
gatttctctgaatcatttact

SEQ ID NO: 297566 - DNA, 21 bp, Artificial sequence
  SiRNA target sequence
atttctctgaatcatttactg

SEQ ID NO: 297567 - DNA, 21 bp, Artificial sequence
  SiRNA target sequence
tttctctgaatcatttactgg

SEQ ID NO: 297568 - DNA, 21 bp, Artificial sequence
  SiRNA target sequence
ttctctgaatcatttactgga

SEQ ID NO: 297569 - DNA, 21 bp, Artificial sequence
  SiRNA target sequence
tctctgaatcatttactggat

SEQ ID NO: 297570 - DNA, 21 bp, Artificial sequence
  SiRNA target sequence
ctctgaatcatttactggatt

SEQ ID NO: 297571 - DNA, 21 bp, Artificial sequence
  SiRNA target sequence
tctgaatcatttactggattt

SEQ ID NO: 297572 - DNA, 21 bp, Artificial sequence
  SiRNA target sequence
ctgaatcatttactggatttt

SEQ ID NO: 297573 - DNA, 21 bp, Artificial sequence
  SiRNA target sequence
tgaatcatttactggattttt

SEQ ID NO: 297574 - DNA, 21 bp, Artificial sequence
  SiRNA target sequence
gaatcatttactggatttttg

SEQ ID NO: 297575 - DNA, 21 bp, Artificial sequence
  SiRNA target sequence
aatcatttactggatttttgt

SEQ ID NO: 297576 - DNA, 21 bp, Artificial sequence
  SiRNA target sequence
atcatttactggatttttgtg

SEQ ID NO: 297577 - DNA, 21 bp, Artificial sequence
  SiRNA target sequence
tcatttactggatttttgtgc

SEQ ID NO: 297578 - DNA, 21 bp, Artificial sequence
  SiRNA target sequence
catttactggatttttgtgca

SEQ ID NO: 297579 - DNA, 21 bp, Artificial sequence
  SiRNA target sequence
atttactggatttttgtgcat

SEQ ID NO: 297580 - DNA, 21 bp, Artificial sequence
  SiRNA target sequence
tttactggatttttgtgcata

SEQ ID NO: 297581 - DNA, 21 bp, Artificial sequence
  SiRNA target sequence
ttactggatttttgtgcataa

SEQ ID NO: 297582 - DNA, 21 bp, Artificial sequence
  SiRNA target sequence
tactggatttttgtgcataag

SEQ ID NO: 297583 - DNA, 21 bp, Artificial sequence
  SiRNA target sequence
actggatttttgtgcataaga

SEQ ID NO: 297584 - DNA, 21 bp, Artificial sequence
  SiRNA target sequence
ctggatttttgtgcataagac

SEQ ID NO: 297585 - DNA, 21 bp, Artificial sequence
  SiRNA target sequence
tggatttttgtgcataagacc

SEQ ID NO: 297586 - DNA, 21 bp, Artificial sequence
  SiRNA target sequence
ggatttttgtgcataagacct

SEQ ID NO: 297587 - DNA, 21 bp, Artificial sequence
  SiRNA target sequence
gatttttgtgcataagaccta

SEQ ID NO: 297588 - DNA, 21 bp, Artificial sequence
  SiRNA target sequence
atttttgtgcataagacctat

SEQ ID NO: 297589 - DNA, 21 bp, Artificial sequence
  SiRNA target sequence
tttttgtgcataagacctatt

SEQ ID NO: 297590 - DNA, 21 bp, Artificial sequence
  SiRNA target sequence
ttttgtgcataagacctatta

SEQ ID NO: 297591 - DNA, 21 bp, Artificial sequence
  SiRNA target sequence
tttgtgcataagacctattac

SEQ ID NO: 297592 - DNA, 21 bp, Artificial sequence
  SiRNA target sequence
ttgtgcataagacctattaca

SEQ ID NO: 297593 - DNA, 21 bp, Artificial sequence
  SiRNA target sequence
tgtgcataagacctattacaa

SEQ ID NO: 297594 - DNA, 21 bp, Artificial sequence
  SiRNA target sequence
gtgcataagacctattacaaa

SEQ ID NO: 297595 - DNA, 21 bp, Artificial sequence
  SiRNA target sequence
tgcataagacctattacaaaa

SEQ ID NO: 297596 - DNA, 21 bp, Artificial sequence
  SiRNA target sequence
gcataagacctattacaaaat

SEQ ID NO: 297597 - DNA, 21 bp, Artificial sequence
  SiRNA target sequence
cataagacctattacaaaatt

SEQ ID NO: 297598 - DNA, 21 bp, Artificial sequence
  SiRNA target sequence
ataagacctattacaaaattt

SEQ ID NO: 297599 - DNA, 21 bp, Artificial sequence
  SiRNA target sequence
taagacctattacaaaattta

SEQ ID NO: 297600 - DNA, 21 bp, Artificial sequence
  SiRNA target sequence
aagacctattacaaaatttat

SEQ ID NO: 297601 - DNA, 21 bp, Artificial sequence
  SiRNA target sequence
agacctattacaaaatttatg

SEQ ID NO: 297602 - DNA, 21 bp, Artificial sequence
  SiRNA target sequence
gacctattacaaaatttatgt

SEQ ID NO: 297603 - DNA, 21 bp, Artificial sequence
  SiRNA target sequence
acctattacaaaatttatgtg

SEQ ID NO: 297604 - DNA, 21 bp, Artificial sequence
  SiRNA target sequence
cctattacaaaatttatgtgt

SEQ ID NO: 297605 - DNA, 21 bp, Artificial sequence
  SiRNA target sequence
ctattacaaaatttatgtgtc

SEQ ID NO: 297606 - DNA, 21 bp, Artificial sequence
  SiRNA target sequence
tattacaaaatttatgtgtcc

SEQ ID NO: 297607 - DNA, 21 bp, Artificial sequence
  SiRNA target sequence
attacaaaatttatgtgtcca

SEQ ID NO: 297608 - DNA, 21 bp, Artificial sequence
  SiRNA target sequence
ttacaaaatttatgtgtccag

SEQ ID NO: 297609 - DNA, 21 bp, Artificial sequence
  SiRNA target sequence
tacaaaatttatgtgtccaga

SEQ ID NO: 297610 - DNA, 21 bp, Artificial sequence
  SiRNA target sequence
acaaaatttatgtgtccagag

SEQ ID NO: 297611 - DNA, 21 bp, Artificial sequence
  SiRNA target sequence
caaaatttatgtgtccagaga

SEQ ID NO: 297612 - DNA, 21 bp, Artificial sequence
  SiRNA target sequence
aaaatttatgtgtccagagac

SEQ ID NO: 297613 - DNA, 21 bp, Artificial sequence
  SiRNA target sequence
aaatttatgtgtccagagact

SEQ ID NO: 297614 - DNA, 21 bp, Artificial sequence
  SiRNA target sequence
aatttatgtgtccagagactg

SEQ ID NO: 297615 - DNA, 21 bp, Artificial sequence
  SiRNA target sequence
atttatgtgtccagagactgt

SEQ ID NO: 297616 - DNA, 21 bp, Artificial sequence
  SiRNA target sequence
tttatgtgtccagagactgta

SEQ ID NO: 297617 - DNA, 21 bp, Artificial sequence
  SiRNA target sequence
ttatgtgtccagagactgtat

SEQ ID NO: 297618 - DNA, 21 bp, Artificial sequence
  SiRNA target sequence
tatgtgtccagagactgtatc

SEQ ID NO: 297619 - DNA, 21 bp, Artificial sequence
  SiRNA target sequence
atgtgtccagagactgtatcc

SEQ ID NO: 297620 - DNA, 21 bp, Artificial sequence
  SiRNA target sequence
tgtgtccagagactgtatcca

SEQ ID NO: 297621 - DNA, 21 bp, Artificial sequence
  SiRNA target sequence
gtgtccagagactgtatccaa

SEQ ID NO: 297622 - DNA, 21 bp, Artificial sequence
  SiRNA target sequence
tgtccagagactgtatccaat

SEQ ID NO: 297623 - DNA, 21 bp, Artificial sequence
  SiRNA target sequence
gtccagagactgtatccaata

SEQ ID NO: 297624 - DNA, 21 bp, Artificial sequence
  SiRNA target sequence
tccagagactgtatccaataa

SEQ ID NO: 297625 - DNA, 21 bp, Artificial sequence
  SiRNA target sequence
ccagagactgtatccaataat

SEQ ID NO: 297626 - DNA, 21 bp, Artificial sequence
  SiRNA target sequence
cagagactgtatccaataatg

SEQ ID NO: 297627 - DNA, 21 bp, Artificial sequence
  SiRNA target sequence
agagactgtatccaataatgt

SEQ ID NO: 297628 - DNA, 21 bp, Artificial sequence
  SiRNA target sequence
gagactgtatccaataatgtg

SEQ ID NO: 297629 - DNA, 21 bp, Artificial sequence
  SiRNA target sequence
agactgtatccaataatgtgt

SEQ ID NO: 297630 - DNA, 21 bp, Artificial sequence
  SiRNA target sequence
gactgtatccaataatgtgtc

SEQ ID NO: 297631 - DNA, 21 bp, Artificial sequence
  SiRNA target sequence
actgtatccaataatgtgtcg

SEQ ID NO: 297632 - DNA, 21 bp, Artificial sequence
  SiRNA target sequence
ctgtatccaataatgtgtcga

SEQ ID NO: 297633 - DNA, 21 bp, Artificial sequence
  SiRNA target sequence
tgtatccaataatgtgtcgat

SEQ ID NO: 297634 - DNA, 21 bp, Artificial sequence
  SiRNA target sequence
gtatccaataatgtgtcgata

SEQ ID NO: 297635 - DNA, 21 bp, Artificial sequence
  SiRNA target sequence
tatccaataatgtgtcgatag

SEQ ID NO: 297636 - DNA, 21 bp, Artificial sequence
  SiRNA target sequence
atccaataatgtgtcgatagt

SEQ ID NO: 297637 - DNA, 21 bp, Artificial sequence
  SiRNA target sequence
tccaataatgtgtcgatagtt

SEQ ID NO: 297638 - DNA, 21 bp, Artificial sequence
  SiRNA target sequence
ccaataatgtgtcgatagttg

SEQ ID NO: 297639 - DNA, 21 bp, Artificial sequence
  SiRNA target sequence
caataatgtgtcgatagttgt

SEQ ID NO: 297640 - DNA, 21 bp, Artificial sequence
  SiRNA target sequence
aataatgtgtcgatagttgta

SEQ ID NO: 297641 - DNA, 21 bp, Artificial sequence
  SiRNA target sequence
ataatgtgtcgatagttgtat

SEQ ID NO: 297642 - DNA, 21 bp, Artificial sequence
  SiRNA target sequence
taatgtgtcgatagttgtatg

SEQ ID NO: 297643 - DNA, 21 bp, Artificial sequence
  SiRNA target sequence
aatgtgtcgatagttgtatgg

SEQ ID NO: 297644 - DNA, 21 bp, Artificial sequence
  SiRNA target sequence
atgtgtcgatagttgtatgga

SEQ ID NO: 297645 - DNA, 21 bp, Artificial sequence
  SiRNA target sequence
tgtgtcgatagttgtatggaa

SEQ ID NO: 297646 - DNA, 21 bp, Artificial sequence
  SiRNA target sequence
gtgtcgatagttgtatggaag

SEQ ID NO: 297647 - DNA, 21 bp, Artificial sequence
  SiRNA target sequence
tgtcgatagttgtatggaagt

SEQ ID NO: 297648 - DNA, 21 bp, Artificial sequence
  SiRNA target sequence
gtcgatagttgtatggaagtg

SEQ ID NO: 297649 - DNA, 21 bp, Artificial sequence
  SiRNA target sequence
tcgatagttgtatggaagtgg

SEQ ID NO: 297650 - DNA, 21 bp, Artificial sequence
  SiRNA target sequence
cgatagttgtatggaagtggg

SEQ ID NO: 297651 - DNA, 21 bp, Artificial sequence
  SiRNA target sequence
gatagttgtatggaagtgggc

SEQ ID NO: 297652 - DNA, 21 bp, Artificial sequence
  SiRNA target sequence
atagttgtatggaagtgggct

SEQ ID NO: 297653 - DNA, 21 bp, Artificial sequence
  SiRNA target sequence
tagttgtatggaagtgggctg

SEQ ID NO: 297654 - DNA, 21 bp, Artificial sequence
  SiRNA target sequence
agttgtatggaagtgggctga

SEQ ID NO: 297655 - DNA, 21 bp, Artificial sequence
  SiRNA target sequence
gttgtatggaagtgggctgaa

SEQ ID NO: 297656 - DNA, 21 bp, Artificial sequence
  SiRNA target sequence
ttgtatggaagtgggctgaag

SEQ ID NO: 297657 - DNA, 21 bp, Artificial sequence
  SiRNA target sequence
tgtatggaagtgggctgaaga

SEQ ID NO: 297658 - DNA, 21 bp, Artificial sequence
  SiRNA target sequence
gtatggaagtgggctgaagat

SEQ ID NO: 297659 - DNA, 21 bp, Artificial sequence
  SiRNA target sequence
tatggaagtgggctgaagatg

SEQ ID NO: 297660 - DNA, 21 bp, Artificial sequence
  SiRNA target sequence
atggaagtgggctgaagatgt

SEQ ID NO: 297661 - DNA, 21 bp, Artificial sequence
  SiRNA target sequence
tggaagtgggctgaagatgtg

SEQ ID NO: 297662 - DNA, 21 bp, Artificial sequence
  SiRNA target sequence
ggaagtgggctgaagatgtgg

SEQ ID NO: 297663 - DNA, 21 bp, Artificial sequence
  SiRNA target sequence
gaagtgggctgaagatgtggt

SEQ ID NO: 297664 - DNA, 21 bp, Artificial sequence
  SiRNA target sequence
aagtgggctgaagatgtggta

SEQ ID NO: 297665 - DNA, 21 bp, Artificial sequence
  SiRNA target sequence
agtgggctgaagatgtggtag

SEQ ID NO: 297666 - DNA, 21 bp, Artificial sequence
  SiRNA target sequence
gtgggctgaagatgtggtagt

SEQ ID NO: 297667 - DNA, 21 bp, Artificial sequence
  SiRNA target sequence
tgggctgaagatgtggtagta

SEQ ID NO: 297668 - DNA, 21 bp, Artificial sequence
  SiRNA target sequence
gggctgaagatgtggtagtag

SEQ ID NO: 297669 - DNA, 21 bp, Artificial sequence
  SiRNA target sequence
ggctgaagatgtggtagtagt

SEQ ID NO: 297670 - DNA, 21 bp, Artificial sequence
  SiRNA target sequence
gctgaagatgtggtagtagta

SEQ ID NO: 297671 - DNA, 21 bp, Artificial sequence
  SiRNA target sequence
ctgaagatgtggtagtagtag

SEQ ID NO: 297672 - DNA, 21 bp, Artificial sequence
  SiRNA target sequence
tgaagatgtggtagtagtaga

SEQ ID NO: 297673 - DNA, 21 bp, Artificial sequence
  SiRNA target sequence
gaagatgtggtagtagtagaa

SEQ ID NO: 297674 - DNA, 21 bp, Artificial sequence
  SiRNA target sequence
aagatgtggtagtagtagaac

SEQ ID NO: 297675 - DNA, 21 bp, Artificial sequence
  SiRNA target sequence
agatgtggtagtagtagaacc

SEQ ID NO: 297676 - DNA, 21 bp, Artificial sequence
  SiRNA target sequence
gatgtggtagtagtagaacct

SEQ ID NO: 297677 - DNA, 21 bp, Artificial sequence
  SiRNA target sequence
atgtggtagtagtagaaccta

SEQ ID NO: 297678 - DNA, 21 bp, Artificial sequence
  SiRNA target sequence
tgtggtagtagtagaacctaa

SEQ ID NO: 297679 - DNA, 21 bp, Artificial sequence
  SiRNA target sequence
gtggtagtagtagaacctaag

SEQ ID NO: 297680 - DNA, 21 bp, Artificial sequence
  SiRNA target sequence
tggtagtagtagaacctaagc

SEQ ID NO: 297681 - DNA, 21 bp, Artificial sequence
  SiRNA target sequence
ggtagtagtagaacctaagcc

SEQ ID NO: 297682 - DNA, 21 bp, Artificial sequence
  SiRNA target sequence
gtagtagtagaacctaagcct

SEQ ID NO: 297683 - DNA, 21 bp, Artificial sequence
  SiRNA target sequence
tagtagtagaacctaagcctt

SEQ ID NO: 297684 - DNA, 21 bp, Artificial sequence
  SiRNA target sequence
agtagtagaacctaagccttt

SEQ ID NO: 297685 - DNA, 21 bp, Artificial sequence
  SiRNA target sequence
gtagtagaacctaagccttta

SEQ ID NO: 297686 - DNA, 21 bp, Artificial sequence
  SiRNA target sequence
tagtagaacctaagcctttac

SEQ ID NO: 297687 - DNA, 21 bp, Artificial sequence
  SiRNA target sequence
agtagaacctaagcctttact

SEQ ID NO: 297688 - DNA, 21 bp, Artificial sequence
  SiRNA target sequence
gtagaacctaagcctttactt

SEQ ID NO: 297689 - DNA, 21 bp, Artificial sequence
  SiRNA target sequence
tagaacctaagcctttacttt

SEQ ID NO: 297690 - DNA, 21 bp, Artificial sequence
  SiRNA target sequence
agaacctaagcctttactttc

SEQ ID NO: 297691 - DNA, 21 bp, Artificial sequence
  SiRNA target sequence
gaacctaagcctttactttca

SEQ ID NO: 297692 - DNA, 21 bp, Artificial sequence
  SiRNA target sequence
aacctaagcctttactttcag

SEQ ID NO: 297693 - DNA, 21 bp, Artificial sequence
  SiRNA target sequence
acctaagcctttactttcagg

SEQ ID NO: 297694 - DNA, 21 bp, Artificial sequence
  SiRNA target sequence
cctaagcctttactttcagga

SEQ ID NO: 297695 - DNA, 21 bp, Artificial sequence
  SiRNA target sequence
ctaagcctttactttcaggac

SEQ ID NO: 297696 - DNA, 21 bp, Artificial sequence
  SiRNA target sequence
taagcctttactttcaggacc

SEQ ID NO: 297697 - DNA, 21 bp, Artificial sequence
  SiRNA target sequence
aagcctttactttcaggacca

SEQ ID NO: 297698 - DNA, 21 bp, Artificial sequence
  SiRNA target sequence
agcctttactttcaggaccaa

SEQ ID NO: 297699 - DNA, 21 bp, Artificial sequence
  SiRNA target sequence
gcctttactttcaggaccaac

SEQ ID NO: 297700 - DNA, 21 bp, Artificial sequence
  SiRNA target sequence
cctttactttcaggaccaacg

SEQ ID NO: 297701 - DNA, 21 bp, Artificial sequence
  SiRNA target sequence
ctttactttcaggaccaacgc

SEQ ID NO: 297702 - DNA, 21 bp, Artificial sequence
  SiRNA target sequence
tttactttcaggaccaacgca

SEQ ID NO: 297703 - DNA, 21 bp, Artificial sequence
  SiRNA target sequence
ttactttcaggaccaacgcaa

SEQ ID NO: 297704 - DNA, 21 bp, Artificial sequence
  SiRNA target sequence
tactttcaggaccaacgcaag

SEQ ID NO: 297705 - DNA, 21 bp, Artificial sequence
  SiRNA target sequence
actttcaggaccaacgcaagt

SEQ ID NO: 297706 - DNA, 21 bp, Artificial sequence
  SiRNA target sequence
ctttcaggaccaacgcaagtg

SEQ ID NO: 297707 - DNA, 21 bp, Artificial sequence
  SiRNA target sequence
tttcaggaccaacgcaagtgt

SEQ ID NO: 297708 - DNA, 21 bp, Artificial sequence
  SiRNA target sequence
ttcaggaccaacgcaagtgtt

SEQ ID NO: 297709 - DNA, 21 bp, Artificial sequence
  SiRNA target sequence
tcaggaccaacgcaagtgttt

SEQ ID NO: 297710 - DNA, 21 bp, Artificial sequence
  SiRNA target sequence
caggaccaacgcaagtgtttc

SEQ ID NO: 297711 - DNA, 21 bp, Artificial sequence
  SiRNA target sequence
aggaccaacgcaagtgtttca

SEQ ID NO: 297712 - DNA, 21 bp, Artificial sequence
  SiRNA target sequence
ggaccaacgcaagtgtttcaa

SEQ ID NO: 297713 - DNA, 21 bp, Artificial sequence
  SiRNA target sequence
gaccaacgcaagtgtttcaac

SEQ ID NO: 297714 - DNA, 21 bp, Artificial sequence
  SiRNA target sequence
accaacgcaagtgtttcaacc

SEQ ID NO: 297715 - DNA, 21 bp, Artificial sequence
  SiRNA target sequence
ccaacgcaagtgtttcaacca

SEQ ID NO: 297716 - DNA, 21 bp, Artificial sequence
  SiRNA target sequence
caacgcaagtgtttcaaccac

SEQ ID NO: 297717 - DNA, 21 bp, Artificial sequence
  SiRNA target sequence
aacgcaagtgtttcaaccacc

SEQ ID NO: 297718 - DNA, 21 bp, Artificial sequence
  SiRNA target sequence
acgcaagtgtttcaaccacct

SEQ ID NO: 297719 - DNA, 21 bp, Artificial sequence
  SiRNA target sequence
cgcaagtgtttcaaccacctg

SEQ ID NO: 297720 - DNA, 21 bp, Artificial sequence
  SiRNA target sequence
gcaagtgtttcaaccacctgt

SEQ ID NO: 297721 - DNA, 21 bp, Artificial sequence
  SiRNA target sequence
caagtgtttcaaccacctgta

SEQ ID NO: 297722 - DNA, 21 bp, Artificial sequence
  SiRNA target sequence
aagtgtttcaaccacctgtaa

SEQ ID NO: 297723 - DNA, 21 bp, Artificial sequence
  SiRNA target sequence
agtgtttcaaccacctgtaac

SEQ ID NO: 297724 - DNA, 21 bp, Artificial sequence
  SiRNA target sequence
gtgtttcaaccacctgtaaca

SEQ ID NO: 297725 - DNA, 21 bp, Artificial sequence
  SiRNA target sequence
tgtttcaaccacctgtaacat

SEQ ID NO: 297726 - DNA, 21 bp, Artificial sequence
  SiRNA target sequence
gtttcaaccacctgtaacatc

SEQ ID NO: 297727 - DNA, 21 bp, Artificial sequence
  SiRNA target sequence
tttcaaccacctgtaacatct

SEQ ID NO: 297728 - DNA, 21 bp, Artificial sequence
  SiRNA target sequence
ttcaaccacctgtaacatctg

SEQ ID NO: 297729 - DNA, 21 bp, Artificial sequence
  SiRNA target sequence
tcaaccacctgtaacatctgc

SEQ ID NO: 297730 - DNA, 21 bp, Artificial sequence
  SiRNA target sequence
caaccacctgtaacatctgca

SEQ ID NO: 297731 - DNA, 21 bp, Artificial sequence
  SiRNA target sequence
aaccacctgtaacatctgcag

SEQ ID NO: 297732 - DNA, 21 bp, Artificial sequence
  SiRNA target sequence
accacctgtaacatctgcaga

SEQ ID NO: 297733 - DNA, 21 bp, Artificial sequence
  SiRNA target sequence
ccacctgtaacatctgcagat

SEQ ID NO: 297734 - DNA, 21 bp, Artificial sequence
  SiRNA target sequence
cacctgtaacatctgcagatt

SEQ ID NO: 297735 - DNA, 21 bp, Artificial sequence
  SiRNA target sequence
acctgtaacatctgcagattc

SEQ ID NO: 297736 - DNA, 21 bp, Artificial sequence
  SiRNA target sequence
cctgtaacatctgcagattct

SEQ ID NO: 297737 - DNA, 21 bp, Artificial sequence
  SiRNA target sequence
ctgtaacatctgcagattcta

SEQ ID NO: 297738 - DNA, 21 bp, Artificial sequence
  SiRNA target sequence
tgtaacatctgcagattctat

SEQ ID NO: 297739 - DNA, 21 bp, Artificial sequence
  SiRNA target sequence
gtaacatctgcagattctatc

SEQ ID NO: 297740 - DNA, 21 bp, Artificial sequence
  SiRNA target sequence
taacatctgcagattctatca

SEQ ID NO: 297741 - DNA, 21 bp, Artificial sequence
  SiRNA target sequence
aacatctgcagattctatcaa

SEQ ID NO: 297742 - DNA, 21 bp, Artificial sequence
  SiRNA target sequence
acatctgcagattctatcaat

SEQ ID NO: 297743 - DNA, 21 bp, Artificial sequence
  SiRNA target sequence
catctgcagattctatcaata

SEQ ID NO: 297744 - DNA, 21 bp, Artificial sequence
  SiRNA target sequence
atctgcagattctatcaatac

SEQ ID NO: 297745 - DNA, 21 bp, Artificial sequence
  SiRNA target sequence
tctgcagattctatcaatacc

SEQ ID NO: 297746 - DNA, 21 bp, Artificial sequence
  SiRNA target sequence
ctgcagattctatcaatacca

SEQ ID NO: 297747 - DNA, 21 bp, Artificial sequence
  SiRNA target sequence
tgcagattctatcaataccat

SEQ ID NO: 297748 - DNA, 21 bp, Artificial sequence
  SiRNA target sequence
gcagattctatcaataccata

SEQ ID NO: 297749 - DNA, 21 bp, Artificial sequence
  SiRNA target sequence
cagattctatcaataccatag

SEQ ID NO: 297750 - DNA, 21 bp, Artificial sequence
  SiRNA target sequence
agattctatcaataccataga

SEQ ID NO: 297751 - DNA, 21 bp, Artificial sequence
  SiRNA target sequence
gattctatcaataccatagat

SEQ ID NO: 297752 - DNA, 21 bp, Artificial sequence
  SiRNA target sequence
attctatcaataccatagatg

SEQ ID NO: 297753 - DNA, 21 bp, Artificial sequence
  SiRNA target sequence
ttctatcaataccatagatgc

SEQ ID NO: 297754 - DNA, 21 bp, Artificial sequence
  SiRNA target sequence
tctatcaataccatagatgct

SEQ ID NO: 297755 - DNA, 21 bp, Artificial sequence
  SiRNA target sequence
ctatcaataccatagatgctt

SEQ ID NO: 297756 - DNA, 21 bp, Artificial sequence
  SiRNA target sequence
tatcaataccatagatgcttc

SEQ ID NO: 297757 - DNA, 21 bp, Artificial sequence
  SiRNA target sequence
atcaataccatagatgcttca

SEQ ID NO: 297758 - DNA, 21 bp, Artificial sequence
  SiRNA target sequence
tcaataccatagatgcttcaa

SEQ ID NO: 297759 - DNA, 21 bp, Artificial sequence
  SiRNA target sequence
caataccatagatgcttcaat

SEQ ID NO: 297760 - DNA, 21 bp, Artificial sequence
  SiRNA target sequence
aataccatagatgcttcaatg

SEQ ID NO: 297761 - DNA, 21 bp, Artificial sequence
  SiRNA target sequence
ataccatagatgcttcaatgc

SEQ ID NO: 297762 - DNA, 21 bp, Artificial sequence
  SiRNA target sequence
taccatagatgcttcaatgca

SEQ ID NO: 297763 - DNA, 21 bp, Artificial sequence
  SiRNA target sequence
accatagatgcttcaatgcaa

SEQ ID NO: 297764 - DNA, 21 bp, Artificial sequence
  SiRNA target sequence
ccatagatgcttcaatgcaaa

SEQ ID NO: 297765 - DNA, 21 bp, Artificial sequence
  SiRNA target sequence
catagatgcttcaatgcaaat

SEQ ID NO: 297766 - DNA, 21 bp, Artificial sequence
  SiRNA target sequence
atagatgcttcaatgcaaatt

SEQ ID NO: 297767 - DNA, 21 bp, Artificial sequence
  SiRNA target sequence
tagatgcttcaatgcaaatta

SEQ ID NO: 297768 - DNA, 21 bp, Artificial sequence
  SiRNA target sequence
agatgcttcaatgcaaattaa

SEQ ID NO: 297769 - DNA, 21 bp, Artificial sequence
  SiRNA target sequence
gatgcttcaatgcaaattaac

SEQ ID NO: 297770 - DNA, 21 bp, Artificial sequence
  SiRNA target sequence
atgcttcaatgcaaattaact

SEQ ID NO: 297771 - DNA, 21 bp, Artificial sequence
  SiRNA target sequence
tgcttcaatgcaaattaactt

SEQ ID NO: 297772 - DNA, 21 bp, Artificial sequence
  SiRNA target sequence
gcttcaatgcaaattaactta

SEQ ID NO: 297773 - DNA, 21 bp, Artificial sequence
  SiRNA target sequence
cttcaatgcaaattaacttag

SEQ ID NO: 297774 - DNA, 21 bp, Artificial sequence
  SiRNA target sequence
ttcaatgcaaattaacttagc

SEQ ID NO: 297775 - DNA, 21 bp, Artificial sequence
  SiRNA target sequence
tcaatgcaaattaacttagca

SEQ ID NO: 297776 - DNA, 21 bp, Artificial sequence
  SiRNA target sequence
caatgcaaattaacttagcaa

SEQ ID NO: 297777 - DNA, 21 bp, Artificial sequence
  SiRNA target sequence
aatgcaaattaacttagcaaa

SEQ ID NO: 297778 - DNA, 21 bp, Artificial sequence
  SiRNA target sequence
atgcaaattaacttagcaaat

SEQ ID NO: 297779 - DNA, 21 bp, Artificial sequence
  SiRNA target sequence
tgcaaattaacttagcaaata

SEQ ID NO: 297780 - DNA, 21 bp, Artificial sequence
  SiRNA target sequence
gcaaattaacttagcaaataa

SEQ ID NO: 297781 - DNA, 21 bp, Artificial sequence
  SiRNA target sequence
caaattaacttagcaaataaa

SEQ ID NO: 297782 - DNA, 21 bp, Artificial sequence
  SiRNA target sequence
aaattaacttagcaaataaag

SEQ ID NO: 297783 - DNA, 21 bp, Artificial sequence
  SiRNA target sequence
aattaacttagcaaataaagc

SEQ ID NO: 297784 - DNA, 21 bp, Artificial sequence
  SiRNA target sequence
attaacttagcaaataaagct

SEQ ID NO: 297785 - DNA, 21 bp, Artificial sequence
  SiRNA target sequence
ttaacttagcaaataaagctg

SEQ ID NO: 297786 - DNA, 21 bp, Artificial sequence
  SiRNA target sequence
taacttagcaaataaagctga

SEQ ID NO: 297787 - DNA, 21 bp, Artificial sequence
  SiRNA target sequence
aacttagcaaataaagctgat

SEQ ID NO: 297788 - DNA, 21 bp, Artificial sequence
  SiRNA target sequence
acttagcaaataaagctgatg

SEQ ID NO: 297789 - DNA, 21 bp, Artificial sequence
  SiRNA target sequence
cttagcaaataaagctgatga

SEQ ID NO: 297790 - DNA, 21 bp, Artificial sequence
  SiRNA target sequence
ttagcaaataaagctgatgaa

SEQ ID NO: 297791 - DNA, 21 bp, Artificial sequence
  SiRNA target sequence
tagcaaataaagctgatgaaa

SEQ ID NO: 297792 - DNA, 21 bp, Artificial sequence
  SiRNA target sequence
agcaaataaagctgatgaaaa

SEQ ID NO: 297793 - DNA, 21 bp, Artificial sequence
  SiRNA target sequence
gcaaataaagctgatgaaaat

SEQ ID NO: 297794 - DNA, 21 bp, Artificial sequence
  SiRNA target sequence
caaataaagctgatgaaaatg

SEQ ID NO: 297795 - DNA, 21 bp, Artificial sequence
  SiRNA target sequence
aaataaagctgatgaaaatgt

SEQ ID NO: 297796 - DNA, 21 bp, Artificial sequence
  SiRNA target sequence
aataaagctgatgaaaatgta

SEQ ID NO: 297797 - DNA, 21 bp, Artificial sequence
  SiRNA target sequence
ataaagctgatgaaaatgtag

SEQ ID NO: 297798 - DNA, 21 bp, Artificial sequence
  SiRNA target sequence
taaagctgatgaaaatgtagt

SEQ ID NO: 297799 - DNA, 21 bp, Artificial sequence
  SiRNA target sequence
aaagctgatgaaaatgtagtt

SEQ ID NO: 297800 - DNA, 21 bp, Artificial sequence
  SiRNA target sequence
aagctgatgaaaatgtagtta

SEQ ID NO: 297801 - DNA, 21 bp, Artificial sequence
  SiRNA target sequence
agctgatgaaaatgtagttac

SEQ ID NO: 297802 - DNA, 21 bp, Artificial sequence
  SiRNA target sequence
gctgatgaaaatgtagttaca

SEQ ID NO: 297803 - DNA, 21 bp, Artificial sequence
  SiRNA target sequence
ctgatgaaaatgtagttacat

SEQ ID NO: 297804 - DNA, 21 bp, Artificial sequence
  SiRNA target sequence
tgatgaaaatgtagttacatt

SEQ ID NO: 297805 - DNA, 21 bp, Artificial sequence
  SiRNA target sequence
gatgaaaatgtagttacattc

SEQ ID NO: 297806 - DNA, 21 bp, Artificial sequence
  SiRNA target sequence
atgaaaatgtagttacattct

SEQ ID NO: 297807 - DNA, 21 bp, Artificial sequence
  SiRNA target sequence
tgaaaatgtagttacattctt

SEQ ID NO: 297808 - DNA, 21 bp, Artificial sequence
  SiRNA target sequence
gaaaatgtagttacattcttt

SEQ ID NO: 297809 - DNA, 21 bp, Artificial sequence
  SiRNA target sequence
aaaatgtagttacattctttg

SEQ ID NO: 297810 - DNA, 21 bp, Artificial sequence
  SiRNA target sequence
aaatgtagttacattctttga

SEQ ID NO: 297811 - DNA, 21 bp, Artificial sequence
  SiRNA target sequence
aatgtagttacattctttgat

SEQ ID NO: 297812 - DNA, 21 bp, Artificial sequence
  SiRNA target sequence
atgtagttacattctttgatt

SEQ ID NO: 297813 - DNA, 21 bp, Artificial sequence
  SiRNA target sequence
tgtagttacattctttgattc

SEQ ID NO: 297814 - DNA, 21 bp, Artificial sequence
  SiRNA target sequence
gtagttacattctttgattct

SEQ ID NO: 297815 - DNA, 21 bp, Artificial sequence
  SiRNA target sequence
tagttacattctttgattctg

SEQ ID NO: 297816 - DNA, 21 bp, Artificial sequence
  SiRNA target sequence
agttacattctttgattctga

SEQ ID NO: 297817 - DNA, 21 bp, Artificial sequence
  SiRNA target sequence
gttacattctttgattctgat

SEQ ID NO: 297818 - DNA, 21 bp, Artificial sequence
  SiRNA target sequence
ttacattctttgattctgatg

SEQ ID NO: 297819 - DNA, 21 bp, Artificial sequence
  SiRNA target sequence
tacattctttgattctgatga

SEQ ID NO: 297820 - DNA, 21 bp, Artificial sequence
  SiRNA target sequence
acattctttgattctgatgat

SEQ ID NO: 297821 - DNA, 21 bp, Artificial sequence
  SiRNA target sequence
cattctttgattctgatgatg

SEQ ID NO: 297822 - DNA, 21 bp, Artificial sequence
  SiRNA target sequence
attctttgattctgatgatgc

SEQ ID NO: 297823 - DNA, 21 bp, Artificial sequence
  SiRNA target sequence
ttctttgattctgatgatgct

SEQ ID NO: 297824 - DNA, 21 bp, Artificial sequence
  SiRNA target sequence
tctttgattctgatgatgctg

SEQ ID NO: 297825 - DNA, 21 bp, Artificial sequence
  SiRNA target sequence
ctttgattctgatgatgctga

SEQ ID NO: 297826 - DNA, 21 bp, Artificial sequence
  SiRNA target sequence
tttgattctgatgatgctgaa

SEQ ID NO: 297827 - DNA, 21 bp, Artificial sequence
  SiRNA target sequence
ttgattctgatgatgctgaag

SEQ ID NO: 297828 - DNA, 21 bp, Artificial sequence
  SiRNA target sequence
tgattctgatgatgctgaaga

SEQ ID NO: 297829 - DNA, 21 bp, Artificial sequence
  SiRNA target sequence
gattctgatgatgctgaagaa

SEQ ID NO: 297830 - DNA, 21 bp, Artificial sequence
  SiRNA target sequence
attctgatgatgctgaagaaa

SEQ ID NO: 297831 - DNA, 21 bp, Artificial sequence
  SiRNA target sequence
ttctgatgatgctgaagaaag

SEQ ID NO: 297832 - DNA, 21 bp, Artificial sequence
  SiRNA target sequence
tctgatgatgctgaagaaagg

SEQ ID NO: 297833 - DNA, 21 bp, Artificial sequence
  SiRNA target sequence
ctgatgatgctgaagaaagga

SEQ ID NO: 297834 - DNA, 21 bp, Artificial sequence
  SiRNA target sequence
tgatgatgctgaagaaaggaa

SEQ ID NO: 297835 - DNA, 21 bp, Artificial sequence
  SiRNA target sequence
gatgatgctgaagaaaggaac

SEQ ID NO: 297836 - DNA, 21 bp, Artificial sequence
  SiRNA target sequence
atgatgctgaagaaaggaaca

SEQ ID NO: 297837 - DNA, 21 bp, Artificial sequence
  SiRNA target sequence
tgatgctgaagaaaggaacat

SEQ ID NO: 297838 - DNA, 21 bp, Artificial sequence
  SiRNA target sequence
gatgctgaagaaaggaacatg

SEQ ID NO: 297839 - DNA, 21 bp, Artificial sequence
  SiRNA target sequence
atgctgaagaaaggaacatgg

SEQ ID NO: 297840 - DNA, 21 bp, Artificial sequence
  SiRNA target sequence
tgctgaagaaaggaacatgga

SEQ ID NO: 297841 - DNA, 21 bp, Artificial sequence
  SiRNA target sequence
gctgaagaaaggaacatggaa

SEQ ID NO: 297842 - DNA, 21 bp, Artificial sequence
  SiRNA target sequence
ctgaagaaaggaacatggaag

SEQ ID NO: 297843 - DNA, 21 bp, Artificial sequence
  SiRNA target sequence
tgaagaaaggaacatggaagc

SEQ ID NO: 297844 - DNA, 21 bp, Artificial sequence
  SiRNA target sequence
gaagaaaggaacatggaagca

SEQ ID NO: 297845 - DNA, 21 bp, Artificial sequence
  SiRNA target sequence
aagaaaggaacatggaagcat

SEQ ID NO: 297846 - DNA, 21 bp, Artificial sequence
  SiRNA target sequence
agaaaggaacatggaagcatt

SEQ ID NO: 297847 - DNA, 21 bp, Artificial sequence
  SiRNA target sequence
gaaaggaacatggaagcatta

SEQ ID NO: 297848 - DNA, 21 bp, Artificial sequence
  SiRNA target sequence
aaaggaacatggaagcattat

SEQ ID NO: 297849 - DNA, 21 bp, Artificial sequence
  SiRNA target sequence
aaggaacatggaagcattatt

SEQ ID NO: 297850 - DNA, 21 bp, Artificial sequence
  SiRNA target sequence
aggaacatggaagcattattg

SEQ ID NO: 297851 - DNA, 21 bp, Artificial sequence
  SiRNA target sequence
ggaacatggaagcattattga

SEQ ID NO: 297852 - DNA, 21 bp, Artificial sequence
  SiRNA target sequence
gaacatggaagcattattgaa

SEQ ID NO: 297853 - DNA, 21 bp, Artificial sequence
  SiRNA target sequence
aacatggaagcattattgaaa

SEQ ID NO: 297854 - DNA, 21 bp, Artificial sequence
  SiRNA target sequence
acatggaagcattattgaaag

SEQ ID NO: 297855 - DNA, 21 bp, Artificial sequence
  SiRNA target sequence
catggaagcattattgaaagg

SEQ ID NO: 297856 - DNA, 21 bp, Artificial sequence
  SiRNA target sequence
atggaagcattattgaaagga

SEQ ID NO: 297857 - DNA, 21 bp, Artificial sequence
  SiRNA target sequence
tggaagcattattgaaaggaa

SEQ ID NO: 297858 - DNA, 21 bp, Artificial sequence
  SiRNA target sequence
ggaagcattattgaaaggaag

SEQ ID NO: 297859 - DNA, 21 bp, Artificial sequence
  SiRNA target sequence
gaagcattattgaaaggaagt

SEQ ID NO: 297860 - DNA, 21 bp, Artificial sequence
  SiRNA target sequence
aagcattattgaaaggaagtg

SEQ ID NO: 297861 - DNA, 21 bp, Artificial sequence
  SiRNA target sequence
agcattattgaaaggaagtgg

SEQ ID NO: 297862 - DNA, 21 bp, Artificial sequence
  SiRNA target sequence
gcattattgaaaggaagtggt

SEQ ID NO: 297863 - DNA, 21 bp, Artificial sequence
  SiRNA target sequence
cattattgaaaggaagtggtg

SEQ ID NO: 297864 - DNA, 21 bp, Artificial sequence
  SiRNA target sequence
attattgaaaggaagtggtga

SEQ ID NO: 297865 - DNA, 21 bp, Artificial sequence
  SiRNA target sequence
ttattgaaaggaagtggtgaa

SEQ ID NO: 297866 - DNA, 21 bp, Artificial sequence
  SiRNA target sequence
tattgaaaggaagtggtgaac

SEQ ID NO: 297867 - DNA, 21 bp, Artificial sequence
  SiRNA target sequence
attgaaaggaagtggtgaaca

SEQ ID NO: 297868 - DNA, 21 bp, Artificial sequence
  SiRNA target sequence
ttgaaaggaagtggtgaacaa

SEQ ID NO: 297869 - DNA, 21 bp, Artificial sequence
  SiRNA target sequence
tgaaaggaagtggtgaacaaa

SEQ ID NO: 297870 - DNA, 21 bp, Artificial sequence
  SiRNA target sequence
gaaaggaagtggtgaacaaat

SEQ ID NO: 297871 - DNA, 21 bp, Artificial sequence
  SiRNA target sequence
aaaggaagtggtgaacaaatc

SEQ ID NO: 297872 - DNA, 21 bp, Artificial sequence
  SiRNA target sequence
aaggaagtggtgaacaaatca

SEQ ID NO: 297873 - DNA, 21 bp, Artificial sequence
  SiRNA target sequence
aggaagtggtgaacaaatcat

SEQ ID NO: 297874 - DNA, 21 bp, Artificial sequence
  SiRNA target sequence
ggaagtggtgaacaaatcatg

SEQ ID NO: 297875 - DNA, 21 bp, Artificial sequence
  SiRNA target sequence
gaagtggtgaacaaatcatga

SEQ ID NO: 297876 - DNA, 21 bp, Artificial sequence
  SiRNA target sequence
aagtggtgaacaaatcatgaa

SEQ ID NO: 297877 - DNA, 21 bp, Artificial sequence
  SiRNA target sequence
agtggtgaacaaatcatgaat

SEQ ID NO: 297878 - DNA, 21 bp, Artificial sequence
  SiRNA target sequence
gtggtgaacaaatcatgaatt

SEQ ID NO: 297879 - DNA, 21 bp, Artificial sequence
  SiRNA target sequence
tggtgaacaaatcatgaattt

SEQ ID NO: 297880 - DNA, 21 bp, Artificial sequence
  SiRNA target sequence
ggtgaacaaatcatgaatttg

SEQ ID NO: 297881 - DNA, 21 bp, Artificial sequence
  SiRNA target sequence
gtgaacaaatcatgaatttga

SEQ ID NO: 297882 - DNA, 21 bp, Artificial sequence
  SiRNA target sequence
tgaacaaatcatgaatttgag

SEQ ID NO: 297883 - DNA, 21 bp, Artificial sequence
  SiRNA target sequence
gaacaaatcatgaatttgaga

SEQ ID NO: 297884 - DNA, 21 bp, Artificial sequence
  SiRNA target sequence
aacaaatcatgaatttgagat

SEQ ID NO: 297885 - DNA, 21 bp, Artificial sequence
  SiRNA target sequence
acaaatcatgaatttgagatc

SEQ ID NO: 297886 - DNA, 21 bp, Artificial sequence
  SiRNA target sequence
caaatcatgaatttgagatcc

SEQ ID NO: 297887 - DNA, 21 bp, Artificial sequence
  SiRNA target sequence
aaatcatgaatttgagatcct

SEQ ID NO: 297888 - DNA, 21 bp, Artificial sequence
  SiRNA target sequence
aatcatgaatttgagatcctt

SEQ ID NO: 297889 - DNA, 21 bp, Artificial sequence
  SiRNA target sequence
atcatgaatttgagatcctta

SEQ ID NO: 297890 - DNA, 21 bp, Artificial sequence
  SiRNA target sequence
tcatgaatttgagatccttac

SEQ ID NO: 297891 - DNA, 21 bp, Artificial sequence
  SiRNA target sequence
catgaatttgagatccttact

SEQ ID NO: 297892 - DNA, 21 bp, Artificial sequence
  SiRNA target sequence
atgaatttgagatccttacta

SEQ ID NO: 297893 - DNA, 21 bp, Artificial sequence
  SiRNA target sequence
tgaatttgagatccttactaa

SEQ ID NO: 297894 - DNA, 21 bp, Artificial sequence
  SiRNA target sequence
gaatttgagatccttactaag

SEQ ID NO: 297895 - DNA, 21 bp, Artificial sequence
  SiRNA target sequence
aatttgagatccttactaaga

SEQ ID NO: 297896 - DNA, 21 bp, Artificial sequence
  SiRNA target sequence
atttgagatccttactaagaa

SEQ ID NO: 297897 - DNA, 21 bp, Artificial sequence
  SiRNA target sequence
tttgagatccttactaagaac

SEQ ID NO: 297898 - DNA, 21 bp, Artificial sequence
  SiRNA target sequence
ttgagatccttactaagaacg

SEQ ID NO: 297899 - DNA, 21 bp, Artificial sequence
  SiRNA target sequence
tgagatccttactaagaacgt

SEQ ID NO: 297900 - DNA, 21 bp, Artificial sequence
  SiRNA target sequence
gagatccttactaagaacgtt

SEQ ID NO: 297901 - DNA, 21 bp, Artificial sequence
  SiRNA target sequence
agatccttactaagaacgttt

SEQ ID NO: 297902 - DNA, 21 bp, Artificial sequence
  SiRNA target sequence
gatccttactaagaacgttta

SEQ ID NO: 297903 - DNA, 21 bp, Artificial sequence
  SiRNA target sequence
atccttactaagaacgtttag

SEQ ID NO: 297904 - DNA, 21 bp, Artificial sequence
  SiRNA target sequence
tccttactaagaacgtttagg

SEQ ID NO: 297905 - DNA, 21 bp, Artificial sequence
  SiRNA target sequence
ccttactaagaacgtttagga

SEQ ID NO: 297906 - DNA, 21 bp, Artificial sequence
  SiRNA target sequence
cttactaagaacgtttaggac

SEQ ID NO: 297907 - DNA, 21 bp, Artificial sequence
  SiRNA target sequence
ttactaagaacgtttaggacc

SEQ ID NO: 297908 - DNA, 21 bp, Artificial sequence
  SiRNA target sequence
tactaagaacgtttaggacca

SEQ ID NO: 297909 - DNA, 21 bp, Artificial sequence
  SiRNA target sequence
actaagaacgtttaggaccat

SEQ ID NO: 297910 - DNA, 21 bp, Artificial sequence
  SiRNA target sequence
ctaagaacgtttaggaccata

SEQ ID NO: 297911 - DNA, 21 bp, Artificial sequence
  SiRNA target sequence
taagaacgtttaggaccatat

SEQ ID NO: 297912 - DNA, 21 bp, Artificial sequence
  SiRNA target sequence
aagaacgtttaggaccatatc

SEQ ID NO: 297913 - DNA, 21 bp, Artificial sequence
  SiRNA target sequence
agaacgtttaggaccatatca

SEQ ID NO: 297914 - DNA, 21 bp, Artificial sequence
  SiRNA target sequence
gaacgtttaggaccatatcag

SEQ ID NO: 297915 - DNA, 21 bp, Artificial sequence
  SiRNA target sequence
aacgtttaggaccatatcaga

SEQ ID NO: 297916 - DNA, 21 bp, Artificial sequence
  SiRNA target sequence
acgtttaggaccatatcagaa

SEQ ID NO: 297917 - DNA, 21 bp, Artificial sequence
  SiRNA target sequence
cgtttaggaccatatcagaaa

SEQ ID NO: 297918 - DNA, 21 bp, Artificial sequence
  SiRNA target sequence
gtttaggaccatatcagaaaa

SEQ ID NO: 297919 - DNA, 21 bp, Artificial sequence
  SiRNA target sequence
tttaggaccatatcagaaaat

SEQ ID NO: 297920 - DNA, 21 bp, Artificial sequence
  SiRNA target sequence
ttaggaccatatcagaaaatt

SEQ ID NO: 297921 - DNA, 21 bp, Artificial sequence
  SiRNA target sequence
taggaccatatcagaaaattg

SEQ ID NO: 297922 - DNA, 21 bp, Artificial sequence
  SiRNA target sequence
aggaccatatcagaaaattgg

SEQ ID NO: 297923 - DNA, 21 bp, Artificial sequence
  SiRNA target sequence
ggaccatatcagaaaattgga

SEQ ID NO: 297924 - DNA, 21 bp, Artificial sequence
  SiRNA target sequence
gaccatatcagaaaattggaa

SEQ ID NO: 297925 - DNA, 21 bp, Artificial sequence
  SiRNA target sequence
accatatcagaaaattggaat

SEQ ID NO: 297926 - DNA, 21 bp, Artificial sequence
  SiRNA target sequence
ccatatcagaaaattggaatt

SEQ ID NO: 297927 - DNA, 21 bp, Artificial sequence
  SiRNA target sequence
catatcagaaaattggaattt

SEQ ID NO: 297928 - DNA, 21 bp, Artificial sequence
  SiRNA target sequence
atatcagaaaattggaattta

SEQ ID NO: 297929 - DNA, 21 bp, Artificial sequence
  SiRNA target sequence
tatcagaaaattggaatttac

SEQ ID NO: 297930 - DNA, 21 bp, Artificial sequence
  SiRNA target sequence
atcagaaaattggaatttacc

SEQ ID NO: 297931 - DNA, 21 bp, Artificial sequence
  SiRNA target sequence
tcagaaaattggaatttacca

SEQ ID NO: 297932 - DNA, 21 bp, Artificial sequence
  SiRNA target sequence
cagaaaattggaatttaccac

SEQ ID NO: 297933 - DNA, 21 bp, Artificial sequence
  SiRNA target sequence
agaaaattggaatttaccacc

SEQ ID NO: 297934 - DNA, 21 bp, Artificial sequence
  SiRNA target sequence
gaaaattggaatttaccacct

SEQ ID NO: 297935 - DNA, 21 bp, Artificial sequence
  SiRNA target sequence
aaaattggaatttaccaccta

SEQ ID NO: 297936 - DNA, 21 bp, Artificial sequence
  SiRNA target sequence
aaattggaatttaccacctaa

SEQ ID NO: 297937 - DNA, 21 bp, Artificial sequence
  SiRNA target sequence
aattggaatttaccacctaac

SEQ ID NO: 297938 - DNA, 21 bp, Artificial sequence
  SiRNA target sequence
attggaatttaccacctaaca

SEQ ID NO: 297939 - DNA, 21 bp, Artificial sequence
  SiRNA target sequence
ttggaatttaccacctaacac

SEQ ID NO: 297940 - DNA, 21 bp, Artificial sequence
  SiRNA target sequence
tggaatttaccacctaacaca

SEQ ID NO: 297941 - DNA, 21 bp, Artificial sequence
  SiRNA target sequence
ggaatttaccacctaacacaa

SEQ ID NO: 297942 - DNA, 21 bp, Artificial sequence
  SiRNA target sequence
gaatttaccacctaacacaaa

SEQ ID NO: 297943 - DNA, 21 bp, Artificial sequence
  SiRNA target sequence
aatttaccacctaacacaaaa

SEQ ID NO: 297944 - DNA, 21 bp, Artificial sequence
  SiRNA target sequence
atttaccacctaacacaaaaa

SEQ ID NO: 297945 - DNA, 21 bp, Artificial sequence
  SiRNA target sequence
tttaccacctaacacaaaaac

SEQ ID NO: 297946 - DNA, 21 bp, Artificial sequence
  SiRNA target sequence
ttaccacctaacacaaaaaca

SEQ ID NO: 297947 - DNA, 21 bp, Artificial sequence
  SiRNA target sequence
taccacctaacacaaaaacag

SEQ ID NO: 297948 - DNA, 21 bp, Artificial sequence
  SiRNA target sequence
accacctaacacaaaaacagc

SEQ ID NO: 297949 - DNA, 21 bp, Artificial sequence
  SiRNA target sequence
ccacctaacacaaaaacagca

SEQ ID NO: 297950 - DNA, 21 bp, Artificial sequence
  SiRNA target sequence
cacctaacacaaaaacagcaa

SEQ ID NO: 297951 - DNA, 21 bp, Artificial sequence
  SiRNA target sequence
acctaacacaaaaacagcaat

SEQ ID NO: 297952 - DNA, 21 bp, Artificial sequence
  SiRNA target sequence
cctaacacaaaaacagcaata

SEQ ID NO: 297953 - DNA, 21 bp, Artificial sequence
  SiRNA target sequence
ctaacacaaaaacagcaataa

SEQ ID NO: 297954 - DNA, 21 bp, Artificial sequence
  SiRNA target sequence
taacacaaaaacagcaataac

SEQ ID NO: 297955 - DNA, 21 bp, Artificial sequence
  SiRNA target sequence
aacacaaaaacagcaataaca

SEQ ID NO: 297956 - DNA, 21 bp, Artificial sequence
  SiRNA target sequence
acacaaaaacagcaataacag

SEQ ID NO: 297957 - DNA, 21 bp, Artificial sequence
  SiRNA target sequence
cacaaaaacagcaataacaga

SEQ ID NO: 297958 - DNA, 21 bp, Artificial sequence
  SiRNA target sequence
acaaaaacagcaataacagat

SEQ ID NO: 297959 - DNA, 21 bp, Artificial sequence
  SiRNA target sequence
caaaaacagcaataacagatt

SEQ ID NO: 297960 - DNA, 21 bp, Artificial sequence
  SiRNA target sequence
aaaaacagcaataacagattt

SEQ ID NO: 297961 - DNA, 21 bp, Artificial sequence
  SiRNA target sequence
aaaacagcaataacagatttg

SEQ ID NO: 297962 - DNA, 21 bp, Artificial sequence
  SiRNA target sequence
aaacagcaataacagatttga

SEQ ID NO: 297963 - DNA, 21 bp, Artificial sequence
  SiRNA target sequence
aacagcaataacagatttgac

SEQ ID NO: 297964 - DNA, 21 bp, Artificial sequence
  SiRNA target sequence
acagcaataacagatttgact

SEQ ID NO: 297965 - DNA, 21 bp, Artificial sequence
  SiRNA target sequence
cagcaataacagatttgactg

SEQ ID NO: 297966 - DNA, 21 bp, Artificial sequence
  SiRNA target sequence
agcaataacagatttgactga

SEQ ID NO: 297967 - DNA, 21 bp, Artificial sequence
  SiRNA target sequence
gcaataacagatttgactgac

SEQ ID NO: 297968 - DNA, 21 bp, Artificial sequence
  SiRNA target sequence
caataacagatttgactgacg

SEQ ID NO: 297969 - DNA, 21 bp, Artificial sequence
  SiRNA target sequence
aataacagatttgactgacgt

SEQ ID NO: 297970 - DNA, 21 bp, Artificial sequence
  SiRNA target sequence
ataacagatttgactgacgtt

SEQ ID NO: 297971 - DNA, 21 bp, Artificial sequence
  SiRNA target sequence
taacagatttgactgacgttg

SEQ ID NO: 297972 - DNA, 21 bp, Artificial sequence
  SiRNA target sequence
aacagatttgactgacgttgc

SEQ ID NO: 297973 - DNA, 21 bp, Artificial sequence
  SiRNA target sequence
acagatttgactgacgttgcg

SEQ ID NO: 297974 - DNA, 21 bp, Artificial sequence
  SiRNA target sequence
cagatttgactgacgttgcgg

SEQ ID NO: 297975 - DNA, 21 bp, Artificial sequence
  SiRNA target sequence
agatttgactgacgttgcgga

SEQ ID NO: 297976 - DNA, 21 bp, Artificial sequence
  SiRNA target sequence
gatttgactgacgttgcggat

SEQ ID NO: 297977 - DNA, 21 bp, Artificial sequence
  SiRNA target sequence
atttgactgacgttgcggata

SEQ ID NO: 297978 - DNA, 21 bp, Artificial sequence
  SiRNA target sequence
tttgactgacgttgcggataa

SEQ ID NO: 297979 - DNA, 21 bp, Artificial sequence
  SiRNA target sequence
ttgactgacgttgcggataaa

SEQ ID NO: 297980 - DNA, 21 bp, Artificial sequence
  SiRNA target sequence
tgactgacgttgcggataaag

SEQ ID NO: 297981 - DNA, 21 bp, Artificial sequence
  SiRNA target sequence
gactgacgttgcggataaaga

SEQ ID NO: 297982 - DNA, 21 bp, Artificial sequence
  SiRNA target sequence
actgacgttgcggataaagaa

SEQ ID NO: 297983 - DNA, 21 bp, Artificial sequence
  SiRNA target sequence
ctgacgttgcggataaagaag

SEQ ID NO: 297984 - DNA, 21 bp, Artificial sequence
  SiRNA target sequence
tgacgttgcggataaagaagg

SEQ ID NO: 297985 - DNA, 21 bp, Artificial sequence
  SiRNA target sequence
gacgttgcggataaagaaggt

SEQ ID NO: 297986 - DNA, 21 bp, Artificial sequence
  SiRNA target sequence
acgttgcggataaagaaggta

SEQ ID NO: 297987 - DNA, 21 bp, Artificial sequence
  SiRNA target sequence
cgttgcggataaagaaggtag

SEQ ID NO: 297988 - DNA, 21 bp, Artificial sequence
  SiRNA target sequence
gttgcggataaagaaggtagg

SEQ ID NO: 297989 - DNA, 21 bp, Artificial sequence
  SiRNA target sequence
ttgcggataaagaaggtaggg

SEQ ID NO: 297990 - DNA, 21 bp, Artificial sequence
  SiRNA target sequence
tgcggataaagaaggtaggga

SEQ ID NO: 297991 - DNA, 21 bp, Artificial sequence
  SiRNA target sequence
gcggataaagaaggtagggat

SEQ ID NO: 297992 - DNA, 21 bp, Artificial sequence
  SiRNA target sequence
cggataaagaaggtagggatt

SEQ ID NO: 297993 - DNA, 21 bp, Artificial sequence
  SiRNA target sequence
ggataaagaaggtagggatta

SEQ ID NO: 297994 - DNA, 21 bp, Artificial sequence
  SiRNA target sequence
gataaagaaggtagggattat

SEQ ID NO: 297995 - DNA, 21 bp, Artificial sequence
  SiRNA target sequence
ataaagaaggtagggattata

SEQ ID NO: 297996 - DNA, 21 bp, Artificial sequence
  SiRNA target sequence
taaagaaggtagggattatat

SEQ ID NO: 297997 - DNA, 21 bp, Artificial sequence
  SiRNA target sequence
aaagaaggtagggattatatg

SEQ ID NO: 297998 - DNA, 21 bp, Artificial sequence
  SiRNA target sequence
aagaaggtagggattatatgt

SEQ ID NO: 297999 - DNA, 21 bp, Artificial sequence
  SiRNA target sequence
agaaggtagggattatatgtc

SEQ ID NO: 298000 - DNA, 21 bp, Artificial sequence
  SiRNA target sequence
gaaggtagggattatatgtct

SEQ ID NO: 298001 - DNA, 21 bp, Artificial sequence
  SiRNA target sequence
aaggtagggattatatgtctt

SEQ ID NO: 298002 - DNA, 21 bp, Artificial sequence
  SiRNA target sequence
aggtagggattatatgtctta

SEQ ID NO: 298003 - DNA, 21 bp, Artificial sequence
  SiRNA target sequence
ggtagggattatatgtcttat

SEQ ID NO: 298004 - DNA, 21 bp, Artificial sequence
  SiRNA target sequence
gtagggattatatgtcttatt

SEQ ID NO: 298005 - DNA, 21 bp, Artificial sequence
  SiRNA target sequence
tagggattatatgtcttattt

SEQ ID NO: 298006 - DNA, 21 bp, Artificial sequence
  SiRNA target sequence
agggattatatgtcttattta

SEQ ID NO: 298007 - DNA, 21 bp, Artificial sequence
  SiRNA target sequence
gggattatatgtcttatttat

SEQ ID NO: 298008 - DNA, 21 bp, Artificial sequence
  SiRNA target sequence
ggattatatgtcttatttatc

SEQ ID NO: 298009 - DNA, 21 bp, Artificial sequence
  SiRNA target sequence
gattatatgtcttatttatca

SEQ ID NO: 298010 - DNA, 21 bp, Artificial sequence
  SiRNA target sequence
attatatgtcttatttatcat

SEQ ID NO: 298011 - DNA, 21 bp, Artificial sequence
  SiRNA target sequence
ttatatgtcttatttatcata

SEQ ID NO: 298012 - DNA, 21 bp, Artificial sequence
  SiRNA target sequence
tatatgtcttatttatcatac

SEQ ID NO: 298013 - DNA, 21 bp, Artificial sequence
  SiRNA target sequence
atatgtcttatttatcataca

SEQ ID NO: 298014 - DNA, 21 bp, Artificial sequence
  SiRNA target sequence
tatgtcttatttatcatacat

SEQ ID NO: 298015 - DNA, 21 bp, Artificial sequence
  SiRNA target sequence
atgtcttatttatcatacatc

SEQ ID NO: 298016 - DNA, 21 bp, Artificial sequence
  SiRNA target sequence
tgtcttatttatcatacatct

SEQ ID NO: 298017 - DNA, 21 bp, Artificial sequence
  SiRNA target sequence
gtcttatttatcatacatcta

SEQ ID NO: 298018 - DNA, 21 bp, Artificial sequence
  SiRNA target sequence
tcttatttatcatacatctat

SEQ ID NO: 298019 - DNA, 21 bp, Artificial sequence
  SiRNA target sequence
cttatttatcatacatctata

SEQ ID NO: 298020 - DNA, 21 bp, Artificial sequence
  SiRNA target sequence
ttatttatcatacatctatag

SEQ ID NO: 298021 - DNA, 21 bp, Artificial sequence
  SiRNA target sequence
tatttatcatacatctataga

SEQ ID NO: 298022 - DNA, 21 bp, Artificial sequence
  SiRNA target sequence
atttatcatacatctatagat

SEQ ID NO: 298023 - DNA, 21 bp, Artificial sequence
  SiRNA target sequence
tttatcatacatctatagatt

SEQ ID NO: 298024 - DNA, 21 bp, Artificial sequence
  SiRNA target sequence
ttatcatacatctatagattc

SEQ ID NO: 298025 - DNA, 21 bp, Artificial sequence
  SiRNA target sequence
tatcatacatctatagattct

SEQ ID NO: 298026 - DNA, 21 bp, Artificial sequence
  SiRNA target sequence
atcatacatctatagattcta

SEQ ID NO: 298027 - DNA, 21 bp, Artificial sequence
  SiRNA target sequence
tcatacatctatagattctat

SEQ ID NO: 298028 - DNA, 21 bp, Artificial sequence
  SiRNA target sequence
catacatctatagattctata

SEQ ID NO: 298029 - DNA, 21 bp, Artificial sequence
  SiRNA target sequence
atacatctatagattctatag

SEQ ID NO: 298030 - DNA, 21 bp, Artificial sequence
  SiRNA target sequence
tacatctatagattctataga

SEQ ID NO: 298031 - DNA, 21 bp, Artificial sequence
  SiRNA target sequence
acatctatagattctatagag

SEQ ID NO: 298032 - DNA, 21 bp, Artificial sequence
  SiRNA target sequence
catctatagattctatagagg

SEQ ID NO: 298033 - DNA, 21 bp, Artificial sequence
  SiRNA target sequence
atctatagattctatagagga

SEQ ID NO: 298034 - DNA, 21 bp, Artificial sequence
  SiRNA target sequence
tctatagattctatagaggag

SEQ ID NO: 298035 - DNA, 21 bp, Artificial sequence
  SiRNA target sequence
ctatagattctatagaggagg

SEQ ID NO: 298036 - DNA, 21 bp, Artificial sequence
  SiRNA target sequence
tatagattctatagaggaggg

SEQ ID NO: 298037 - DNA, 21 bp, Artificial sequence
  SiRNA target sequence
atagattctatagaggaggga

SEQ ID NO: 298038 - DNA, 21 bp, Artificial sequence
  SiRNA target sequence
tagattctatagaggagggag

SEQ ID NO: 298039 - DNA, 21 bp, Artificial sequence
  SiRNA target sequence
agattctatagaggagggaga

SEQ ID NO: 298040 - DNA, 21 bp, Artificial sequence
  SiRNA target sequence
gattctatagaggagggagaa

SEQ ID NO: 298041 - DNA, 21 bp, Artificial sequence
  SiRNA target sequence
attctatagaggagggagaag

SEQ ID NO: 298042 - DNA, 21 bp, Artificial sequence
  SiRNA target sequence
ttctatagaggagggagaaga

SEQ ID NO: 298043 - DNA, 21 bp, Artificial sequence
  SiRNA target sequence
tctatagaggagggagaagat

SEQ ID NO: 298044 - DNA, 21 bp, Artificial sequence
  SiRNA target sequence
ctatagaggagggagaagata

SEQ ID NO: 298045 - DNA, 21 bp, Artificial sequence
  SiRNA target sequence
tatagaggagggagaagatat

SEQ ID NO: 298046 - DNA, 21 bp, Artificial sequence
  SiRNA target sequence
atagaggagggagaagatata

SEQ ID NO: 298047 - DNA, 21 bp, Artificial sequence
  SiRNA target sequence
tagaggagggagaagatataa

SEQ ID NO: 298048 - DNA, 21 bp, Artificial sequence
  SiRNA target sequence
agaggagggagaagatataag

SEQ ID NO: 298049 - DNA, 21 bp, Artificial sequence
  SiRNA target sequence
gaggagggagaagatataagt

SEQ ID NO: 298050 - DNA, 21 bp, Artificial sequence
  SiRNA target sequence
aggagggagaagatataagtt

SEQ ID NO: 298051 - DNA, 21 bp, Artificial sequence
  SiRNA target sequence
ggagggagaagatataagttt

SEQ ID NO: 298052 - DNA, 21 bp, Artificial sequence
  SiRNA target sequence
gagggagaagatataagtttt

SEQ ID NO: 298053 - DNA, 21 bp, Artificial sequence
  SiRNA target sequence
agggagaagatataagttttt

SEQ ID NO: 298054 - DNA, 21 bp, Artificial sequence
  SiRNA target sequence
gggagaagatataagtttttc

SEQ ID NO: 298055 - DNA, 21 bp, Artificial sequence
  SiRNA target sequence
ggagaagatataagtttttca

SEQ ID NO: 298056 - DNA, 21 bp, Artificial sequence
  SiRNA target sequence
gagaagatataagtttttcaa

SEQ ID NO: 298057 - DNA, 21 bp, Artificial sequence
  SiRNA target sequence
agaagatataagtttttcaat

SEQ ID NO: 298058 - DNA, 21 bp, Artificial sequence
  SiRNA target sequence
gaagatataagtttttcaata

SEQ ID NO: 298059 - DNA, 21 bp, Artificial sequence
  SiRNA target sequence
aagatataagtttttcaatac

SEQ ID NO: 298060 - DNA, 21 bp, Artificial sequence
  SiRNA target sequence
agatataagtttttcaataca

SEQ ID NO: 298061 - DNA, 21 bp, Artificial sequence
  SiRNA target sequence
gatataagtttttcaatacaa

SEQ ID NO: 298062 - DNA, 21 bp, Artificial sequence
  SiRNA target sequence
atataagtttttcaatacaac

SEQ ID NO: 298063 - DNA, 21 bp, Artificial sequence
  SiRNA target sequence
tataagtttttcaatacaaca

SEQ ID NO: 298064 - DNA, 21 bp, Artificial sequence
  SiRNA target sequence
ataagtttttcaatacaacag

SEQ ID NO: 298065 - DNA, 21 bp, Artificial sequence
  SiRNA target sequence
taagtttttcaatacaacagc

SEQ ID NO: 298066 - DNA, 21 bp, Artificial sequence
  SiRNA target sequence
aagtttttcaatacaacagct

SEQ ID NO: 298067 - DNA, 21 bp, Artificial sequence
  SiRNA target sequence
agtttttcaatacaacagctt

SEQ ID NO: 298068 - DNA, 21 bp, Artificial sequence
  SiRNA target sequence
gtttttcaatacaacagcttt

SEQ ID NO: 298069 - DNA, 21 bp, Artificial sequence
  SiRNA target sequence
tttttcaatacaacagctttg

SEQ ID NO: 298070 - DNA, 21 bp, Artificial sequence
  SiRNA target sequence
ttttcaatacaacagctttga

SEQ ID NO: 298071 - DNA, 21 bp, Artificial sequence
  SiRNA target sequence
tttcaatacaacagctttgaa

SEQ ID NO: 298072 - DNA, 21 bp, Artificial sequence
  SiRNA target sequence
ttcaatacaacagctttgaaa

SEQ ID NO: 298073 - DNA, 21 bp, Artificial sequence
  SiRNA target sequence
tcaatacaacagctttgaaac

SEQ ID NO: 298074 - DNA, 21 bp, Artificial sequence
  SiRNA target sequence
caatacaacagctttgaaaca

SEQ ID NO: 298075 - DNA, 21 bp, Artificial sequence
  SiRNA target sequence
aatacaacagctttgaaacaa

SEQ ID NO: 298076 - DNA, 21 bp, Artificial sequence
  SiRNA target sequence
atacaacagctttgaaacaat

SEQ ID NO: 298077 - DNA, 21 bp, Artificial sequence
  SiRNA target sequence
tacaacagctttgaaacaatc

SEQ ID NO: 298078 - DNA, 21 bp, Artificial sequence
  SiRNA target sequence
acaacagctttgaaacaatct

SEQ ID NO: 298079 - DNA, 21 bp, Artificial sequence
  SiRNA target sequence
caacagctttgaaacaatctc

SEQ ID NO: 298080 - DNA, 21 bp, Artificial sequence
  SiRNA target sequence
aacagctttgaaacaatctca

SEQ ID NO: 298081 - DNA, 21 bp, Artificial sequence
  SiRNA target sequence
acagctttgaaacaatctcaa

SEQ ID NO: 298082 - DNA, 21 bp, Artificial sequence
  SiRNA target sequence
cagctttgaaacaatctcaaa

SEQ ID NO: 298083 - DNA, 21 bp, Artificial sequence
  SiRNA target sequence
agctttgaaacaatctcaaac

SEQ ID NO: 298084 - DNA, 21 bp, Artificial sequence
  SiRNA target sequence
gctttgaaacaatctcaaact

SEQ ID NO: 298085 - DNA, 21 bp, Artificial sequence
  SiRNA target sequence
ctttgaaacaatctcaaactt

SEQ ID NO: 298086 - DNA, 21 bp, Artificial sequence
  SiRNA target sequence
tttgaaacaatctcaaacttg

SEQ ID NO: 298087 - DNA, 21 bp, Artificial sequence
  SiRNA target sequence
ttgaaacaatctcaaacttgc

SEQ ID NO: 298088 - DNA, 21 bp, Artificial sequence
  SiRNA target sequence
tgaaacaatctcaaacttgct

SEQ ID NO: 298089 - DNA, 21 bp, Artificial sequence
  SiRNA target sequence
gaaacaatctcaaacttgcta

SEQ ID NO: 298090 - DNA, 21 bp, Artificial sequence
  SiRNA target sequence
aaacaatctcaaacttgctat

SEQ ID NO: 298091 - DNA, 21 bp, Artificial sequence
  SiRNA target sequence
aacaatctcaaacttgctatg

SEQ ID NO: 298092 - DNA, 21 bp, Artificial sequence
  SiRNA target sequence
acaatctcaaacttgctatgt

SEQ ID NO: 298093 - DNA, 21 bp, Artificial sequence
  SiRNA target sequence
caatctcaaacttgctatgtt

SEQ ID NO: 298094 - DNA, 21 bp, Artificial sequence
  SiRNA target sequence
aatctcaaacttgctatgttc

SEQ ID NO: 298095 - DNA, 21 bp, Artificial sequence
  SiRNA target sequence
atctcaaacttgctatgttcg

SEQ ID NO: 298096 - DNA, 21 bp, Artificial sequence
  SiRNA target sequence
tctcaaacttgctatgttcgt

SEQ ID NO: 298097 - DNA, 21 bp, Artificial sequence
  SiRNA target sequence
ctcaaacttgctatgttcgta

SEQ ID NO: 298098 - DNA, 21 bp, Artificial sequence
  SiRNA target sequence
tcaaacttgctatgttcgtag

SEQ ID NO: 298099 - DNA, 21 bp, Artificial sequence
  SiRNA target sequence
caaacttgctatgttcgtagc

SEQ ID NO: 298100 - DNA, 21 bp, Artificial sequence
  SiRNA target sequence
aaacttgctatgttcgtagct

SEQ ID NO: 298101 - DNA, 21 bp, Artificial sequence
  SiRNA target sequence
aacttgctatgttcgtagctt

SEQ ID NO: 298102 - DNA, 21 bp, Artificial sequence
  SiRNA target sequence
acttgctatgttcgtagcttc

SEQ ID NO: 298103 - DNA, 21 bp, Artificial sequence
  SiRNA target sequence
cttgctatgttcgtagcttct

SEQ ID NO: 298104 - DNA, 21 bp, Artificial sequence
  SiRNA target sequence
ttgctatgttcgtagcttctt

SEQ ID NO: 298105 - DNA, 21 bp, Artificial sequence
  SiRNA target sequence
tgctatgttcgtagcttctta

SEQ ID NO: 298106 - DNA, 21 bp, Artificial sequence
  SiRNA target sequence
gctatgttcgtagcttcttaa

SEQ ID NO: 298107 - DNA, 21 bp, Artificial sequence
  SiRNA target sequence
ctatgttcgtagcttcttaat

SEQ ID NO: 298108 - DNA, 21 bp, Artificial sequence
  SiRNA target sequence
tatgttcgtagcttcttaata

SEQ ID NO: 298109 - DNA, 21 bp, Artificial sequence
  SiRNA target sequence
atgttcgtagcttcttaatac

SEQ ID NO: 298110 - DNA, 21 bp, Artificial sequence
  SiRNA target sequence
tgttcgtagcttcttaatacc

SEQ ID NO: 298111 - DNA, 21 bp, Artificial sequence
  SiRNA target sequence
gttcgtagcttcttaataccg

SEQ ID NO: 298112 - DNA, 21 bp, Artificial sequence
  SiRNA target sequence
ttcgtagcttcttaataccgc

SEQ ID NO: 298113 - DNA, 21 bp, Artificial sequence
  SiRNA target sequence
tcgtagcttcttaataccgcg

SEQ ID NO: 298114 - DNA, 21 bp, Artificial sequence
  SiRNA target sequence
cgtagcttcttaataccgcga

SEQ ID NO: 298115 - DNA, 21 bp, Artificial sequence
  SiRNA target sequence
gtagcttcttaataccgcgat

SEQ ID NO: 298116 - DNA, 21 bp, Artificial sequence
  SiRNA target sequence
tagcttcttaataccgcgata

SEQ ID NO: 298117 - DNA, 21 bp, Artificial sequence
  SiRNA target sequence
agcttcttaataccgcgatat

SEQ ID NO: 298118 - DNA, 21 bp, Artificial sequence
  SiRNA target sequence
gcttcttaataccgcgatatt

SEQ ID NO: 298119 - DNA, 21 bp, Artificial sequence
  SiRNA target sequence
cttcttaataccgcgatatta

SEQ ID NO: 298120 - DNA, 21 bp, Artificial sequence
  SiRNA target sequence
ttcttaataccgcgatattat

SEQ ID NO: 298121 - DNA, 21 bp, Artificial sequence
  SiRNA target sequence
tcttaataccgcgatattata

SEQ ID NO: 298122 - DNA, 21 bp, Artificial sequence
  SiRNA target sequence
cttaataccgcgatattatac

SEQ ID NO: 298123 - DNA, 21 bp, Artificial sequence
  SiRNA target sequence
ttaataccgcgatattatact

SEQ ID NO: 298124 - DNA, 21 bp, Artificial sequence
  SiRNA target sequence
taataccgcgatattatactg

SEQ ID NO: 298125 - DNA, 21 bp, Artificial sequence
  SiRNA target sequence
aataccgcgatattatactgc

SEQ ID NO: 298126 - DNA, 21 bp, Artificial sequence
  SiRNA target sequence
ataccgcgatattatactgct

SEQ ID NO: 298127 - DNA, 21 bp, Artificial sequence
  SiRNA target sequence
taccgcgatattatactgctg

SEQ ID NO: 298128 - DNA, 21 bp, Artificial sequence
  SiRNA target sequence
accgcgatattatactgctga

SEQ ID NO: 298129 - DNA, 21 bp, Artificial sequence
  SiRNA target sequence
ccgcgatattatactgctgat

SEQ ID NO: 298130 - DNA, 21 bp, Artificial sequence
  SiRNA target sequence
cgcgatattatactgctgata

SEQ ID NO: 298131 - DNA, 21 bp, Artificial sequence
  SiRNA target sequence
gcgatattatactgctgataa

SEQ ID NO: 298132 - DNA, 21 bp, Artificial sequence
  SiRNA target sequence
cgatattatactgctgataac

SEQ ID NO: 298133 - DNA, 21 bp, Artificial sequence
  SiRNA target sequence
gatattatactgctgataaca

SEQ ID NO: 298134 - DNA, 21 bp, Artificial sequence
  SiRNA target sequence
atattatactgctgataacac

SEQ ID NO: 298135 - DNA, 21 bp, Artificial sequence
  SiRNA target sequence
tattatactgctgataacaca

SEQ ID NO: 298136 - DNA, 21 bp, Artificial sequence
  SiRNA target sequence
attatactgctgataacacaa

SEQ ID NO: 298137 - DNA, 21 bp, Artificial sequence
  SiRNA target sequence
ttatactgctgataacacaaa

SEQ ID NO: 298138 - DNA, 21 bp, Artificial sequence
  SiRNA target sequence
tatactgctgataacacaaac

SEQ ID NO: 298139 - DNA, 21 bp, Artificial sequence
  SiRNA target sequence
atactgctgataacacaaaca

SEQ ID NO: 298140 - DNA, 21 bp, Artificial sequence
  SiRNA target sequence
tactgctgataacacaaacaa

SEQ ID NO: 298141 - DNA, 21 bp, Artificial sequence
  SiRNA target sequence
actgctgataacacaaacaac

SEQ ID NO: 298142 - DNA, 21 bp, Artificial sequence
  SiRNA target sequence
ctgctgataacacaaacaacg

SEQ ID NO: 298143 - DNA, 21 bp, Artificial sequence
  SiRNA target sequence
tgctgataacacaaacaacga

SEQ ID NO: 298144 - DNA, 21 bp, Artificial sequence
  SiRNA target sequence
gctgataacacaaacaacgat

SEQ ID NO: 298145 - DNA, 21 bp, Artificial sequence
  SiRNA target sequence
ctgataacacaaacaacgatg

SEQ ID NO: 298146 - DNA, 21 bp, Artificial sequence
  SiRNA target sequence
tgataacacaaacaacgatgg

SEQ ID NO: 298147 - DNA, 21 bp, Artificial sequence
  SiRNA target sequence
gataacacaaacaacgatgga

SEQ ID NO: 298148 - DNA, 21 bp, Artificial sequence
  SiRNA target sequence
ataacacaaacaacgatggac

SEQ ID NO: 298149 - DNA, 21 bp, Artificial sequence
  SiRNA target sequence
taacacaaacaacgatggacc

SEQ ID NO: 298150 - DNA, 21 bp, Artificial sequence
  SiRNA target sequence
aacacaaacaacgatggacct

SEQ ID NO: 298151 - DNA, 21 bp, Artificial sequence
  SiRNA target sequence
acacaaacaacgatggacctt

SEQ ID NO: 298152 - DNA, 21 bp, Artificial sequence
  SiRNA target sequence
cacaaacaacgatggaccttc

SEQ ID NO: 298153 - DNA, 21 bp, Artificial sequence
  SiRNA target sequence
acaaacaacgatggaccttca

SEQ ID NO: 298154 - DNA, 21 bp, Artificial sequence
  SiRNA target sequence
caaacaacgatggaccttcac

SEQ ID NO: 298155 - DNA, 21 bp, Artificial sequence
  SiRNA target sequence
aaacaacgatggaccttcaca

SEQ ID NO: 298156 - DNA, 21 bp, Artificial sequence
  SiRNA target sequence
aacaacgatggaccttcacat

SEQ ID NO: 298157 - DNA, 21 bp, Artificial sequence
  SiRNA target sequence
acaacgatggaccttcacata

SEQ ID NO: 298158 - DNA, 21 bp, Artificial sequence
  SiRNA target sequence
caacgatggaccttcacatat

SEQ ID NO: 298159 - DNA, 21 bp, Artificial sequence
  SiRNA target sequence
aacgatggaccttcacatata

SEQ ID NO: 298160 - DNA, 21 bp, Artificial sequence
  SiRNA target sequence
acgatggaccttcacatataa

SEQ ID NO: 298161 - DNA, 21 bp, Artificial sequence
  SiRNA target sequence
cgatggaccttcacatataac

SEQ ID NO: 298162 - DNA, 21 bp, Artificial sequence
  SiRNA target sequence
gatggaccttcacatataaca

SEQ ID NO: 298163 - DNA, 21 bp, Artificial sequence
  SiRNA target sequence
atggaccttcacatataacat

SEQ ID NO: 298164 - DNA, 21 bp, Artificial sequence
  SiRNA target sequence
tggaccttcacatataacata

SEQ ID NO: 298165 - DNA, 21 bp, Artificial sequence
  SiRNA target sequence
ggaccttcacatataacatat

SEQ ID NO: 298166 - DNA, 21 bp, Artificial sequence
  SiRNA target sequence
gaccttcacatataacatatc

SEQ ID NO: 298167 - DNA, 21 bp, Artificial sequence
  SiRNA target sequence
accttcacatataacatatcc

SEQ ID NO: 298168 - DNA, 21 bp, Artificial sequence
  SiRNA target sequence
ccttcacatataacatatcca

SEQ ID NO: 298169 - DNA, 21 bp, Artificial sequence
  SiRNA target sequence
cttcacatataacatatccag

SEQ ID NO: 298170 - DNA, 21 bp, Artificial sequence
  SiRNA target sequence
ttcacatataacatatccagt

SEQ ID NO: 298171 - DNA, 21 bp, Artificial sequence
  SiRNA target sequence
tcacatataacatatccagtt

SEQ ID NO: 298172 - DNA, 21 bp, Artificial sequence
  SiRNA target sequence
cacatataacatatccagttc

SEQ ID NO: 298173 - DNA, 21 bp, Artificial sequence
  SiRNA target sequence
acatataacatatccagttct

SEQ ID NO: 298174 - DNA, 21 bp, Artificial sequence
  SiRNA target sequence
catataacatatccagttctt

SEQ ID NO: 298175 - DNA, 21 bp, Artificial sequence
  SiRNA target sequence
atataacatatccagttctta

SEQ ID NO: 298176 - DNA, 21 bp, Artificial sequence
  SiRNA target sequence
tataacatatccagttcttaa

SEQ ID NO: 298177 - DNA, 21 bp, Artificial sequence
  SiRNA target sequence
ataacatatccagttcttaat

SEQ ID NO: 298178 - DNA, 21 bp, Artificial sequence
  SiRNA target sequence
taacatatccagttcttaatc

SEQ ID NO: 298179 - DNA, 21 bp, Artificial sequence
  SiRNA target sequence
aacatatccagttcttaatcc

SEQ ID NO: 298180 - DNA, 21 bp, Artificial sequence
  SiRNA target sequence
acatatccagttcttaatcca

SEQ ID NO: 298181 - DNA, 21 bp, Artificial sequence
  SiRNA target sequence
catatccagttcttaatccag

SEQ ID NO: 298182 - DNA, 21 bp, Artificial sequence
  SiRNA target sequence
atatccagttcttaatccagt

SEQ ID NO: 298183 - DNA, 21 bp, Artificial sequence
  SiRNA target sequence
tatccagttcttaatccagtt

SEQ ID NO: 298184 - DNA, 21 bp, Artificial sequence
  SiRNA target sequence
atccagttcttaatccagttc

SEQ ID NO: 298185 - DNA, 21 bp, Artificial sequence
  SiRNA target sequence
tccagttcttaatccagttca

SEQ ID NO: 298186 - DNA, 21 bp, Artificial sequence
  SiRNA target sequence
ccagttcttaatccagttcat

SEQ ID NO: 298187 - DNA, 21 bp, Artificial sequence
  SiRNA target sequence
cagttcttaatccagttcatg

SEQ ID NO: 298188 - DNA, 21 bp, Artificial sequence
  SiRNA target sequence
agttcttaatccagttcatga

SEQ ID NO: 298189 - DNA, 21 bp, Artificial sequence
  SiRNA target sequence
gttcttaatccagttcatgaa

SEQ ID NO: 298190 - DNA, 21 bp, Artificial sequence
  SiRNA target sequence
ttcttaatccagttcatgaag

SEQ ID NO: 298191 - DNA, 21 bp, Artificial sequence
  SiRNA target sequence
tcttaatccagttcatgaagt

SEQ ID NO: 298192 - DNA, 21 bp, Artificial sequence
  SiRNA target sequence
cttaatccagttcatgaagta

SEQ ID NO: 298193 - DNA, 21 bp, Artificial sequence
  SiRNA target sequence
ttaatccagttcatgaagtag

SEQ ID NO: 298194 - DNA, 21 bp, Artificial sequence
  SiRNA target sequence
taatccagttcatgaagtaga

SEQ ID NO: 298195 - DNA, 21 bp, Artificial sequence
  SiRNA target sequence
aatccagttcatgaagtagaa

SEQ ID NO: 298196 - DNA, 21 bp, Artificial sequence
  SiRNA target sequence
atccagttcatgaagtagaag

SEQ ID NO: 298197 - DNA, 21 bp, Artificial sequence
  SiRNA target sequence
tccagttcatgaagtagaagt

SEQ ID NO: 298198 - DNA, 21 bp, Artificial sequence
  SiRNA target sequence
ccagttcatgaagtagaagta

SEQ ID NO: 298199 - DNA, 21 bp, Artificial sequence
  SiRNA target sequence
cagttcatgaagtagaagtac

SEQ ID NO: 298200 - DNA, 21 bp, Artificial sequence
  SiRNA target sequence
agttcatgaagtagaagtacc

SEQ ID NO: 298201 - DNA, 21 bp, Artificial sequence
  SiRNA target sequence
gttcatgaagtagaagtacca

SEQ ID NO: 298202 - DNA, 21 bp, Artificial sequence
  SiRNA target sequence
ttcatgaagtagaagtaccat

SEQ ID NO: 298203 - DNA, 21 bp, Artificial sequence
  SiRNA target sequence
tcatgaagtagaagtaccata

SEQ ID NO: 298204 - DNA, 21 bp, Artificial sequence
  SiRNA target sequence
catgaagtagaagtaccatac

SEQ ID NO: 298205 - DNA, 21 bp, Artificial sequence
  SiRNA target sequence
atgaagtagaagtaccatact

SEQ ID NO: 298206 - DNA, 21 bp, Artificial sequence
  SiRNA target sequence
tgaagtagaagtaccatacta

SEQ ID NO: 298207 - DNA, 21 bp, Artificial sequence
  SiRNA target sequence
gaagtagaagtaccatactat

SEQ ID NO: 298208 - DNA, 21 bp, Artificial sequence
  SiRNA target sequence
aagtagaagtaccatactatt

SEQ ID NO: 298209 - DNA, 21 bp, Artificial sequence
  SiRNA target sequence
agtagaagtaccatactattg

SEQ ID NO: 298210 - DNA, 21 bp, Artificial sequence
  SiRNA target sequence
gtagaagtaccatactattgt

SEQ ID NO: 298211 - DNA, 21 bp, Artificial sequence
  SiRNA target sequence
tagaagtaccatactattgtc

SEQ ID NO: 298212 - DNA, 21 bp, Artificial sequence
  SiRNA target sequence
agaagtaccatactattgtca

SEQ ID NO: 298213 - DNA, 21 bp, Artificial sequence
  SiRNA target sequence
gaagtaccatactattgtcaa

SEQ ID NO: 298214 - DNA, 21 bp, Artificial sequence
  SiRNA target sequence
aagtaccatactattgtcaat

SEQ ID NO: 298215 - DNA, 21 bp, Artificial sequence
  SiRNA target sequence
agtaccatactattgtcaata

SEQ ID NO: 298216 - DNA, 21 bp, Artificial sequence
  SiRNA target sequence
gtaccatactattgtcaatat

SEQ ID NO: 298217 - DNA, 21 bp, Artificial sequence
  SiRNA target sequence
taccatactattgtcaatata

SEQ ID NO: 298218 - DNA, 21 bp, Artificial sequence
  SiRNA target sequence
accatactattgtcaatatag

SEQ ID NO: 298219 - DNA, 21 bp, Artificial sequence
  SiRNA target sequence
ccatactattgtcaatatagg

SEQ ID NO: 298220 - DNA, 21 bp, Artificial sequence
  SiRNA target sequence
catactattgtcaatatagga

SEQ ID NO: 298221 - DNA, 21 bp, Artificial sequence
  SiRNA target sequence
atactattgtcaatataggaa

SEQ ID NO: 298222 - DNA, 21 bp, Artificial sequence
  SiRNA target sequence
tactattgtcaatataggaaa

SEQ ID NO: 298223 - DNA, 21 bp, Artificial sequence
  SiRNA target sequence
actattgtcaatataggaaat

SEQ ID NO: 298224 - DNA, 21 bp, Artificial sequence
  SiRNA target sequence
ctattgtcaatataggaaatt

SEQ ID NO: 298225 - DNA, 21 bp, Artificial sequence
  SiRNA target sequence
tattgtcaatataggaaatta

SEQ ID NO: 298226 - DNA, 21 bp, Artificial sequence
  SiRNA target sequence
attgtcaatataggaaattac

SEQ ID NO: 298227 - DNA, 21 bp, Artificial sequence
  SiRNA target sequence
ttgtcaatataggaaattacc

SEQ ID NO: 298228 - DNA, 21 bp, Artificial sequence
  SiRNA target sequence
tgtcaatataggaaattacca

SEQ ID NO: 298229 - DNA, 21 bp, Artificial sequence
  SiRNA target sequence
gtcaatataggaaattaccag

SEQ ID NO: 298230 - DNA, 21 bp, Artificial sequence
  SiRNA target sequence
tcaatataggaaattaccagt

SEQ ID NO: 298231 - DNA, 21 bp, Artificial sequence
  SiRNA target sequence
caatataggaaattaccagta

SEQ ID NO: 298232 - DNA, 21 bp, Artificial sequence
  SiRNA target sequence
aatataggaaattaccagtag

SEQ ID NO: 298233 - DNA, 21 bp, Artificial sequence
  SiRNA target sequence
atataggaaattaccagtagc

SEQ ID NO: 298234 - DNA, 21 bp, Artificial sequence
  SiRNA target sequence
tataggaaattaccagtagca

SEQ ID NO: 298235 - DNA, 21 bp, Artificial sequence
  SiRNA target sequence
ataggaaattaccagtagcat

SEQ ID NO: 298236 - DNA, 21 bp, Artificial sequence
  SiRNA target sequence
taggaaattaccagtagcatc

SEQ ID NO: 298237 - DNA, 21 bp, Artificial sequence
  SiRNA target sequence
aggaaattaccagtagcatct

SEQ ID NO: 298238 - DNA, 21 bp, Artificial sequence
  SiRNA target sequence
ggaaattaccagtagcatcta

SEQ ID NO: 298239 - DNA, 21 bp, Artificial sequence
  SiRNA target sequence
gaaattaccagtagcatctac

SEQ ID NO: 298240 - DNA, 21 bp, Artificial sequence
  SiRNA target sequence
aaattaccagtagcatctaca

SEQ ID NO: 298241 - DNA, 21 bp, Artificial sequence
  SiRNA target sequence
aattaccagtagcatctacaa

SEQ ID NO: 298242 - DNA, 21 bp, Artificial sequence
  SiRNA target sequence
attaccagtagcatctacaac

SEQ ID NO: 298243 - DNA, 21 bp, Artificial sequence
  SiRNA target sequence
ttaccagtagcatctacaacc

SEQ ID NO: 298244 - DNA, 21 bp, Artificial sequence
  SiRNA target sequence
taccagtagcatctacaaccg

SEQ ID NO: 298245 - DNA, 21 bp, Artificial sequence
  SiRNA target sequence
accagtagcatctacaaccga

SEQ ID NO: 298246 - DNA, 21 bp, Artificial sequence
  SiRNA target sequence
ccagtagcatctacaaccgac

SEQ ID NO: 298247 - DNA, 21 bp, Artificial sequence
  SiRNA target sequence
cagtagcatctacaaccgaca

SEQ ID NO: 298248 - DNA, 21 bp, Artificial sequence
  SiRNA target sequence
agtagcatctacaaccgacaa

SEQ ID NO: 298249 - DNA, 21 bp, Artificial sequence
  SiRNA target sequence
gtagcatctacaaccgacaaa

SEQ ID NO: 298250 - DNA, 21 bp, Artificial sequence
  SiRNA target sequence
tagcatctacaaccgacaaag

SEQ ID NO: 298251 - DNA, 21 bp, Artificial sequence
  SiRNA target sequence
agcatctacaaccgacaaagg

SEQ ID NO: 298252 - DNA, 21 bp, Artificial sequence
  SiRNA target sequence
gcatctacaaccgacaaaggg

SEQ ID NO: 298253 - DNA, 21 bp, Artificial sequence
  SiRNA target sequence
catctacaaccgacaaagggt

SEQ ID NO: 298254 - DNA, 21 bp, Artificial sequence
  SiRNA target sequence
atctacaaccgacaaagggta

SEQ ID NO: 298255 - DNA, 21 bp, Artificial sequence
  SiRNA target sequence
tctacaaccgacaaagggtat

SEQ ID NO: 298256 - DNA, 21 bp, Artificial sequence
  SiRNA target sequence
ctacaaccgacaaagggtatg

SEQ ID NO: 298257 - DNA, 21 bp, Artificial sequence
  SiRNA target sequence
tacaaccgacaaagggtatga

SEQ ID NO: 298258 - DNA, 21 bp, Artificial sequence
  SiRNA target sequence
acaaccgacaaagggtatgat

SEQ ID NO: 298259 - DNA, 21 bp, Artificial sequence
  SiRNA target sequence
caaccgacaaagggtatgatg

SEQ ID NO: 298260 - DNA, 21 bp, Artificial sequence
  SiRNA target sequence
aaccgacaaagggtatgatgc

SEQ ID NO: 298261 - DNA, 21 bp, Artificial sequence
  SiRNA target sequence
accgacaaagggtatgatgca

SEQ ID NO: 298262 - DNA, 21 bp, Artificial sequence
  SiRNA target sequence
ccgacaaagggtatgatgcat

SEQ ID NO: 298263 - DNA, 21 bp, Artificial sequence
  SiRNA target sequence
cgacaaagggtatgatgcatc

SEQ ID NO: 298264 - DNA, 21 bp, Artificial sequence
  SiRNA target sequence
gacaaagggtatgatgcatct

SEQ ID NO: 298265 - DNA, 21 bp, Artificial sequence
  SiRNA target sequence
acaaagggtatgatgcatctt

SEQ ID NO: 298266 - DNA, 21 bp, Artificial sequence
  SiRNA target sequence
caaagggtatgatgcatcttt

SEQ ID NO: 298267 - DNA, 21 bp, Artificial sequence
  SiRNA target sequence
aaagggtatgatgcatctttg

SEQ ID NO: 298268 - DNA, 21 bp, Artificial sequence
  SiRNA target sequence
aagggtatgatgcatctttga

SEQ ID NO: 298269 - DNA, 21 bp, Artificial sequence
  SiRNA target sequence
agggtatgatgcatctttgat

SEQ ID NO: 298270 - DNA, 21 bp, Artificial sequence
  SiRNA target sequence
gggtatgatgcatctttgatg

SEQ ID NO: 298271 - DNA, 21 bp, Artificial sequence
  SiRNA target sequence
ggtatgatgcatctttgatgt

SEQ ID NO: 298272 - DNA, 21 bp, Artificial sequence
  SiRNA target sequence
gtatgatgcatctttgatgta

SEQ ID NO: 298273 - DNA, 21 bp, Artificial sequence
  SiRNA target sequence
tatgatgcatctttgatgtat

SEQ ID NO: 298274 - DNA, 21 bp, Artificial sequence
  SiRNA target sequence
atgatgcatctttgatgtatt

SEQ ID NO: 298275 - DNA, 21 bp, Artificial sequence
  SiRNA target sequence
tgatgcatctttgatgtatta

SEQ ID NO: 298276 - DNA, 21 bp, Artificial sequence
  SiRNA target sequence
gatgcatctttgatgtattat

SEQ ID NO: 298277 - DNA, 21 bp, Artificial sequence
  SiRNA target sequence
atgcatctttgatgtattatt

SEQ ID NO: 298278 - DNA, 21 bp, Artificial sequence
  SiRNA target sequence
tgcatctttgatgtattattc

SEQ ID NO: 298279 - DNA, 21 bp, Artificial sequence
  SiRNA target sequence
gcatctttgatgtattattct

SEQ ID NO: 298280 - DNA, 21 bp, Artificial sequence
  SiRNA target sequence
catctttgatgtattattcta

SEQ ID NO: 298281 - DNA, 21 bp, Artificial sequence
  SiRNA target sequence
atctttgatgtattattctaa

SEQ ID NO: 298282 - DNA, 21 bp, Artificial sequence
  SiRNA target sequence
tctttgatgtattattctaat

SEQ ID NO: 298283 - DNA, 21 bp, Artificial sequence
  SiRNA target sequence
ctttgatgtattattctaatg

SEQ ID NO: 298284 - DNA, 21 bp, Artificial sequence
  SiRNA target sequence
tttgatgtattattctaatgt

SEQ ID NO: 298285 - DNA, 21 bp, Artificial sequence
  SiRNA target sequence
ttgatgtattattctaatgtt

SEQ ID NO: 298286 - DNA, 21 bp, Artificial sequence
  SiRNA target sequence
tgatgtattattctaatgttg

SEQ ID NO: 298287 - DNA, 21 bp, Artificial sequence
  SiRNA target sequence
gatgtattattctaatgttgg

SEQ ID NO: 298288 - DNA, 21 bp, Artificial sequence
  SiRNA target sequence
atgtattattctaatgttggt

SEQ ID NO: 298289 - DNA, 21 bp, Artificial sequence
  SiRNA target sequence
tgtattattctaatgttggta

SEQ ID NO: 298290 - DNA, 21 bp, Artificial sequence
  SiRNA target sequence
gtattattctaatgttggtac

SEQ ID NO: 298291 - DNA, 21 bp, Artificial sequence
  SiRNA target sequence
tattattctaatgttggtacc

SEQ ID NO: 298292 - DNA, 21 bp, Artificial sequence
  SiRNA target sequence
attattctaatgttggtacca

SEQ ID NO: 298293 - DNA, 21 bp, Artificial sequence
  SiRNA target sequence
ttattctaatgttggtaccaa

SEQ ID NO: 298294 - DNA, 21 bp, Artificial sequence
  SiRNA target sequence
tattctaatgttggtaccaat

SEQ ID NO: 298295 - DNA, 21 bp, Artificial sequence
  SiRNA target sequence
attctaatgttggtaccaatc

SEQ ID NO: 298296 - DNA, 21 bp, Artificial sequence
  SiRNA target sequence
ttctaatgttggtaccaatca

SEQ ID NO: 298297 - DNA, 21 bp, Artificial sequence
  SiRNA target sequence
tctaatgttggtaccaatcaa

SEQ ID NO: 298298 - DNA, 21 bp, Artificial sequence
  SiRNA target sequence
ctaatgttggtaccaatcaaa

SEQ ID NO: 298299 - DNA, 21 bp, Artificial sequence
  SiRNA target sequence
taatgttggtaccaatcaaat

SEQ ID NO: 298300 - DNA, 21 bp, Artificial sequence
  SiRNA target sequence
aatgttggtaccaatcaaatt

SEQ ID NO: 298301 - DNA, 21 bp, Artificial sequence
  SiRNA target sequence
atgttggtaccaatcaaattg

SEQ ID NO: 298302 - DNA, 21 bp, Artificial sequence
  SiRNA target sequence
tgttggtaccaatcaaattgt

SEQ ID NO: 298303 - DNA, 21 bp, Artificial sequence
  SiRNA target sequence
gttggtaccaatcaaattgtt

SEQ ID NO: 298304 - DNA, 21 bp, Artificial sequence
  SiRNA target sequence
ttggtaccaatcaaattgttg

SEQ ID NO: 298305 - DNA, 21 bp, Artificial sequence
  SiRNA target sequence
tggtaccaatcaaattgttgc

SEQ ID NO: 298306 - DNA, 21 bp, Artificial sequence
  SiRNA target sequence
ggtaccaatcaaattgttgct

SEQ ID NO: 298307 - DNA, 21 bp, Artificial sequence
  SiRNA target sequence
gtaccaatcaaattgttgctc

SEQ ID NO: 298308 - DNA, 21 bp, Artificial sequence
  SiRNA target sequence
taccaatcaaattgttgctcg

SEQ ID NO: 298309 - DNA, 21 bp, Artificial sequence
  SiRNA target sequence
accaatcaaattgttgctcga

SEQ ID NO: 298310 - DNA, 21 bp, Artificial sequence
  SiRNA target sequence
ccaatcaaattgttgctcgag

SEQ ID NO: 298311 - DNA, 21 bp, Artificial sequence
  SiRNA target sequence
caatcaaattgttgctcgagc

SEQ ID NO: 298312 - DNA, 21 bp, Artificial sequence
  SiRNA target sequence
aatcaaattgttgctcgagct

SEQ ID NO: 298313 - DNA, 21 bp, Artificial sequence
  SiRNA target sequence
atcaaattgttgctcgagctg

SEQ ID NO: 298314 - DNA, 21 bp, Artificial sequence
  SiRNA target sequence
tcaaattgttgctcgagctgg

SEQ ID NO: 298315 - DNA, 21 bp, Artificial sequence
  SiRNA target sequence
caaattgttgctcgagctggt

SEQ ID NO: 298316 - DNA, 21 bp, Artificial sequence
  SiRNA target sequence
aaattgttgctcgagctggta

SEQ ID NO: 298317 - DNA, 21 bp, Artificial sequence
  SiRNA target sequence
aattgttgctcgagctggtaa

SEQ ID NO: 298318 - DNA, 21 bp, Artificial sequence
  SiRNA target sequence
attgttgctcgagctggtaat

SEQ ID NO: 298319 - DNA, 21 bp, Artificial sequence
  SiRNA target sequence
ttgttgctcgagctggtaatg

SEQ ID NO: 298320 - DNA, 21 bp, Artificial sequence
  SiRNA target sequence
tgttgctcgagctggtaatga

SEQ ID NO: 298321 - DNA, 21 bp, Artificial sequence
  SiRNA target sequence
gttgctcgagctggtaatgat

SEQ ID NO: 298322 - DNA, 21 bp, Artificial sequence
  SiRNA target sequence
ttgctcgagctggtaatgatg

SEQ ID NO: 298323 - DNA, 21 bp, Artificial sequence
  SiRNA target sequence
tgctcgagctggtaatgatga

SEQ ID NO: 298324 - DNA, 21 bp, Artificial sequence
  SiRNA target sequence
gctcgagctggtaatgatgat

SEQ ID NO: 298325 - DNA, 21 bp, Artificial sequence
  SiRNA target sequence
ctcgagctggtaatgatgatt

SEQ ID NO: 298326 - DNA, 21 bp, Artificial sequence
  SiRNA target sequence
tcgagctggtaatgatgattt

SEQ ID NO: 298327 - DNA, 21 bp, Artificial sequence
  SiRNA target sequence
cgagctggtaatgatgatttc

SEQ ID NO: 298328 - DNA, 21 bp, Artificial sequence
  SiRNA target sequence
gagctggtaatgatgatttca

SEQ ID NO: 298329 - DNA, 21 bp, Artificial sequence
  SiRNA target sequence
agctggtaatgatgatttcac

SEQ ID NO: 298330 - DNA, 21 bp, Artificial sequence
  SiRNA target sequence
gctggtaatgatgatttcact

SEQ ID NO: 298331 - DNA, 21 bp, Artificial sequence
  SiRNA target sequence
ctggtaatgatgatttcactt

SEQ ID NO: 298332 - DNA, 21 bp, Artificial sequence
  SiRNA target sequence
tggtaatgatgatttcacttt

SEQ ID NO: 298333 - DNA, 21 bp, Artificial sequence
  SiRNA target sequence
ggtaatgatgatttcactttt

SEQ ID NO: 298334 - DNA, 21 bp, Artificial sequence
  SiRNA target sequence
gtaatgatgatttcacttttg

SEQ ID NO: 298335 - DNA, 21 bp, Artificial sequence
  SiRNA target sequence
taatgatgatttcacttttgg

SEQ ID NO: 298336 - DNA, 21 bp, Artificial sequence
  SiRNA target sequence
aatgatgatttcacttttgga

SEQ ID NO: 298337 - DNA, 21 bp, Artificial sequence
  SiRNA target sequence
atgatgatttcacttttggat

SEQ ID NO: 298338 - DNA, 21 bp, Artificial sequence
  SiRNA target sequence
tgatgatttcacttttggatg

SEQ ID NO: 298339 - DNA, 21 bp, Artificial sequence
  SiRNA target sequence
gatgatttcacttttggatgg

SEQ ID NO: 298340 - DNA, 21 bp, Artificial sequence
  SiRNA target sequence
atgatttcacttttggatggc

SEQ ID NO: 298341 - DNA, 21 bp, Artificial sequence
  SiRNA target sequence
tgatttcacttttggatggct

SEQ ID NO: 298342 - DNA, 21 bp, Artificial sequence
  SiRNA target sequence
gatttcacttttggatggctc

SEQ ID NO: 298343 - DNA, 21 bp, Artificial sequence
  SiRNA target sequence
atttcacttttggatggctca

SEQ ID NO: 298344 - DNA, 21 bp, Artificial sequence
  SiRNA target sequence
tttcacttttggatggctcat

SEQ ID NO: 298345 - DNA, 21 bp, Artificial sequence
  SiRNA target sequence
ttcacttttggatggctcata

SEQ ID NO: 298346 - DNA, 21 bp, Artificial sequence
  SiRNA target sequence
tcacttttggatggctcatag

SEQ ID NO: 298347 - DNA, 21 bp, Artificial sequence
  SiRNA target sequence
cacttttggatggctcatagg

SEQ ID NO: 298348 - DNA, 21 bp, Artificial sequence
  SiRNA target sequence
acttttggatggctcatagga

SEQ ID NO: 298349 - DNA, 21 bp, Artificial sequence
  SiRNA target sequence
cttttggatggctcataggaa

SEQ ID NO: 298350 - DNA, 21 bp, Artificial sequence
  SiRNA target sequence
ttttggatggctcataggaac

SEQ ID NO: 298351 - DNA, 21 bp, Artificial sequence
  SiRNA target sequence
tttggatggctcataggaaca

SEQ ID NO: 298352 - DNA, 21 bp, Artificial sequence
  SiRNA target sequence
ttggatggctcataggaacac

SEQ ID NO: 298353 - DNA, 21 bp, Artificial sequence
  SiRNA target sequence
tggatggctcataggaacacc

SEQ ID NO: 298354 - DNA, 21 bp, Artificial sequence
  SiRNA target sequence
ggatggctcataggaacaccg

SEQ ID NO: 298355 - DNA, 21 bp, Artificial sequence
  SiRNA target sequence
gatggctcataggaacaccgc

SEQ ID NO: 298356 - DNA, 21 bp, Artificial sequence
  SiRNA target sequence
atggctcataggaacaccgca

SEQ ID NO: 298357 - DNA, 21 bp, Artificial sequence
  SiRNA target sequence
tggctcataggaacaccgcaa

SEQ ID NO: 298358 - DNA, 21 bp, Artificial sequence
  SiRNA target sequence
ggctcataggaacaccgcaaa

SEQ ID NO: 298359 - DNA, 21 bp, Artificial sequence
  SiRNA target sequence
gctcataggaacaccgcaaac

SEQ ID NO: 298360 - DNA, 21 bp, Artificial sequence
  SiRNA target sequence
ctcataggaacaccgcaaact

SEQ ID NO: 298361 - DNA, 21 bp, Artificial sequence
  SiRNA target sequence
tcataggaacaccgcaaactc

SEQ ID NO: 298362 - DNA, 21 bp, Artificial sequence
  SiRNA target sequence
cataggaacaccgcaaactca

SEQ ID NO: 298363 - DNA, 21 bp, Artificial sequence
  SiRNA target sequence
ataggaacaccgcaaactcaa

SEQ ID NO: 298364 - DNA, 21 bp, Artificial sequence
  SiRNA target sequence
taggaacaccgcaaactcaag

SEQ ID NO: 298365 - DNA, 21 bp, Artificial sequence
  SiRNA target sequence
aggaacaccgcaaactcaagg

SEQ ID NO: 298366 - DNA, 21 bp, Artificial sequence
  SiRNA target sequence
ggaacaccgcaaactcaagga

SEQ ID NO: 298367 - DNA, 21 bp, Artificial sequence
  SiRNA target sequence
gaacaccgcaaactcaaggaa

SEQ ID NO: 298368 - DNA, 21 bp, Artificial sequence
  SiRNA target sequence
aacaccgcaaactcaaggaat

SEQ ID NO: 298369 - DNA, 21 bp, Artificial sequence
  SiRNA target sequence
acaccgcaaactcaaggaata

SEQ ID NO: 298370 - DNA, 21 bp, Artificial sequence
  SiRNA target sequence
caccgcaaactcaaggaataa

SEQ ID NO: 298371 - DNA, 21 bp, Artificial sequence
  SiRNA target sequence
accgcaaactcaaggaataac

SEQ ID NO: 298372 - DNA, 21 bp, Artificial sequence
  SiRNA target sequence
ccgcaaactcaaggaataacg

SEQ ID NO: 298373 - DNA, 21 bp, Artificial sequence
  SiRNA target sequence
cgcaaactcaaggaataacga

SEQ ID NO: 298374 - DNA, 21 bp, Artificial sequence
  SiRNA target sequence
gcaaactcaaggaataacgag

SEQ ID NO: 298375 - DNA, 21 bp, Artificial sequence
  SiRNA target sequence
caaactcaaggaataacgaga

SEQ ID NO: 298376 - DNA, 21 bp, Artificial sequence
  SiRNA target sequence
aaactcaaggaataacgagaa

SEQ ID NO: 298377 - DNA, 21 bp, Artificial sequence
  SiRNA target sequence
aactcaaggaataacgagaac

SEQ ID NO: 298378 - DNA, 21 bp, Artificial sequence
  SiRNA target sequence
actcaaggaataacgagaacg

SEQ ID NO: 298379 - DNA, 21 bp, Artificial sequence
  SiRNA target sequence
ctcaaggaataacgagaacgg

SEQ ID NO: 298380 - DNA, 21 bp, Artificial sequence
  SiRNA target sequence
tcaaggaataacgagaacgga

SEQ ID NO: 298381 - DNA, 21 bp, Artificial sequence
  SiRNA target sequence
caaggaataacgagaacggaa

SEQ ID NO: 298382 - DNA, 21 bp, Artificial sequence
  SiRNA target sequence
aaggaataacgagaacggaaa

SEQ ID NO: 298383 - DNA, 21 bp, Artificial sequence
  SiRNA target sequence
aggaataacgagaacggaaac

SEQ ID NO: 298384 - DNA, 21 bp, Artificial sequence
  SiRNA target sequence
ggaataacgagaacggaaact

SEQ ID NO: 298385 - DNA, 21 bp, Artificial sequence
  SiRNA target sequence
gaataacgagaacggaaacta

SEQ ID NO: 298386 - DNA, 21 bp, Artificial sequence
  SiRNA target sequence
aataacgagaacggaaactaa

SEQ ID NO: 298387 - DNA, 21 bp, Artificial sequence
  SiRNA target sequence
ataacgagaacggaaactaaa

SEQ ID NO: 298388 - DNA, 21 bp, Artificial sequence
  SiRNA target sequence
taacgagaacggaaactaaat

SEQ ID NO: 298389 - DNA, 21 bp, Artificial sequence
  SiRNA target sequence
aacgagaacggaaactaaata

SEQ ID NO: 298390 - DNA, 21 bp, Artificial sequence
  SiRNA target sequence
acgagaacggaaactaaataa

SEQ ID NO: 298391 - DNA, 21 bp, Artificial sequence
  SiRNA target sequence
cgagaacggaaactaaataaa

SEQ ID NO: 298392 - DNA, 21 bp, Artificial sequence
  SiRNA target sequence
gagaacggaaactaaataaat

SEQ ID NO: 298393 - DNA, 21 bp, Artificial sequence
  SiRNA target sequence
agaacggaaactaaataaatg

SEQ ID NO: 298394 - DNA, 21 bp, Artificial sequence
  SiRNA target sequence
gaacggaaactaaataaatga

SEQ ID NO: 298395 - DNA, 21 bp, Artificial sequence
  SiRNA target sequence
aacggaaactaaataaatgaa

SEQ ID NO: 298396 - DNA, 21 bp, Artificial sequence
  SiRNA target sequence
acggaaactaaataaatgaat

SEQ ID NO: 298397 - DNA, 21 bp, Artificial sequence
  SiRNA target sequence
cggaaactaaataaatgaatg

SEQ ID NO: 298398 - DNA, 21 bp, Artificial sequence
  SiRNA target sequence
ggaaactaaataaatgaatga

SEQ ID NO: 298399 - DNA, 21 bp, Artificial sequence
  SiRNA target sequence
gaaactaaataaatgaatgaa

SEQ ID NO: 298400 - DNA, 21 bp, Artificial sequence
  SiRNA target sequence
aaactaaataaatgaatgaag

SEQ ID NO: 298401 - DNA, 21 bp, Artificial sequence
  SiRNA target sequence
aactaaataaatgaatgaaga

SEQ ID NO: 298402 - DNA, 21 bp, Artificial sequence
  SiRNA target sequence
actaaataaatgaatgaagat

SEQ ID NO: 298403 - DNA, 21 bp, Artificial sequence
  SiRNA target sequence
ctaaataaatgaatgaagatg

SEQ ID NO: 298404 - DNA, 21 bp, Artificial sequence
  SiRNA target sequence
taaataaatgaatgaagatgt

SEQ ID NO: 298405 - DNA, 21 bp, Artificial sequence
  SiRNA target sequence
aaataaatgaatgaagatgta

SEQ ID NO: 298406 - DNA, 21 bp, Artificial sequence
  SiRNA target sequence
aataaatgaatgaagatgtac

SEQ ID NO: 298407 - DNA, 21 bp, Artificial sequence
  SiRNA target sequence
ataaatgaatgaagatgtact

SEQ ID NO: 298408 - DNA, 21 bp, Artificial sequence
  SiRNA target sequence
taaatgaatgaagatgtactt

SEQ ID NO: 298409 - DNA, 21 bp, Artificial sequence
  SiRNA target sequence
aaatgaatgaagatgtacttt

SEQ ID NO: 298410 - DNA, 21 bp, Artificial sequence
  SiRNA target sequence
aatgaatgaagatgtacttta

SEQ ID NO: 298411 - DNA, 21 bp, Artificial sequence
  SiRNA target sequence
atgaatgaagatgtactttag

SEQ ID NO: 298412 - DNA, 21 bp, Artificial sequence
  SiRNA target sequence
tgaatgaagatgtactttaga

SEQ ID NO: 298413 - DNA, 21 bp, Artificial sequence
  SiRNA target sequence
gaatgaagatgtactttagag

SEQ ID NO: 298414 - DNA, 21 bp, Artificial sequence
  SiRNA target sequence
aatgaagatgtactttagagg

SEQ ID NO: 298415 - DNA, 21 bp, Artificial sequence
  SiRNA target sequence
atgaagatgtactttagagga

SEQ ID NO: 298416 - DNA, 21 bp, Artificial sequence
  SiRNA target sequence
tgaagatgtactttagaggac

SEQ ID NO: 298417 - DNA, 21 bp, Artificial sequence
  SiRNA target sequence
gaagatgtactttagaggaca

SEQ ID NO: 298418 - DNA, 21 bp, Artificial sequence
  SiRNA target sequence
aagatgtactttagaggacag

SEQ ID NO: 298419 - DNA, 21 bp, Artificial sequence
  SiRNA target sequence
agatgtactttagaggacaga

SEQ ID NO: 298420 - DNA, 21 bp, Artificial sequence
  SiRNA target sequence
gatgtactttagaggacagac

SEQ ID NO: 298421 - DNA, 21 bp, Artificial sequence
  SiRNA target sequence
atgtactttagaggacagaca

SEQ ID NO: 298422 - DNA, 21 bp, Artificial sequence
  SiRNA target sequence
tgtactttagaggacagacat

SEQ ID NO: 298423 - DNA, 21 bp, Artificial sequence
  SiRNA target sequence
gtactttagaggacagacata

SEQ ID NO: 298424 - DNA, 21 bp, Artificial sequence
  SiRNA target sequence
tactttagaggacagacatac

SEQ ID NO: 298425 - DNA, 21 bp, Artificial sequence
  SiRNA target sequence
actttagaggacagacatacc

SEQ ID NO: 298426 - DNA, 21 bp, Artificial sequence
  SiRNA target sequence
ctttagaggacagacataccc

SEQ ID NO: 298427 - DNA, 21 bp, Artificial sequence
  SiRNA target sequence
tttagaggacagacataccct

SEQ ID NO: 298428 - DNA, 21 bp, Artificial sequence
  SiRNA target sequence
ttagaggacagacataccctc

SEQ ID NO: 298429 - DNA, 21 bp, Artificial sequence
  SiRNA target sequence
tagaggacagacataccctct

SEQ ID NO: 298430 - DNA, 21 bp, Artificial sequence
  SiRNA target sequence
agaggacagacataccctctt

SEQ ID NO: 298431 - DNA, 21 bp, Artificial sequence
  SiRNA target sequence
gaggacagacataccctcttt

SEQ ID NO: 298432 - DNA, 21 bp, Artificial sequence
  SiRNA target sequence
aggacagacataccctctttt

SEQ ID NO: 298433 - DNA, 21 bp, Artificial sequence
  SiRNA target sequence
ggacagacataccctcttttg

SEQ ID NO: 298434 - DNA, 21 bp, Artificial sequence
  SiRNA target sequence
gacagacataccctcttttgt

SEQ ID NO: 298435 - DNA, 21 bp, Artificial sequence
  SiRNA target sequence
acagacataccctcttttgta

SEQ ID NO: 298436 - DNA, 21 bp, Artificial sequence
  SiRNA target sequence
cagacataccctcttttgtat

SEQ ID NO: 298437 - DNA, 21 bp, Artificial sequence
  SiRNA target sequence
agacataccctcttttgtatg

SEQ ID NO: 298438 - DNA, 21 bp, Artificial sequence
  SiRNA target sequence
gacataccctcttttgtatgg

SEQ ID NO: 298439 - DNA, 21 bp, Artificial sequence
  SiRNA target sequence
acataccctcttttgtatggc

SEQ ID NO: 298440 - DNA, 21 bp, Artificial sequence
  SiRNA target sequence
cataccctcttttgtatggct

SEQ ID NO: 298441 - DNA, 21 bp, Artificial sequence
  SiRNA target sequence
ataccctcttttgtatggcta

SEQ ID NO: 298442 - DNA, 21 bp, Artificial sequence
  SiRNA target sequence
taccctcttttgtatggctat

SEQ ID NO: 298443 - DNA, 21 bp, Artificial sequence
  SiRNA target sequence
accctcttttgtatggctata

SEQ ID NO: 298444 - DNA, 21 bp, Artificial sequence
  SiRNA target sequence
ccctcttttgtatggctatag

SEQ ID NO: 298445 - DNA, 21 bp, Artificial sequence
  SiRNA target sequence
cctcttttgtatggctatagt

SEQ ID NO: 298446 - DNA, 21 bp, Artificial sequence
  SiRNA target sequence
ctcttttgtatggctatagtc

SEQ ID NO: 298447 - DNA, 21 bp, Artificial sequence
  SiRNA target sequence
tcttttgtatggctatagtct

SEQ ID NO: 298448 - DNA, 21 bp, Artificial sequence
  SiRNA target sequence
cttttgtatggctatagtcta

SEQ ID NO: 298449 - DNA, 21 bp, Artificial sequence
  SiRNA target sequence
ttttgtatggctatagtctaa

SEQ ID NO: 298450 - DNA, 21 bp, Artificial sequence
  SiRNA target sequence
tttgtatggctatagtctaaa

SEQ ID NO: 298451 - DNA, 21 bp, Artificial sequence
  SiRNA target sequence
ttgtatggctatagtctaaat

SEQ ID NO: 298452 - DNA, 21 bp, Artificial sequence
  SiRNA target sequence
tgtatggctatagtctaaatt

SEQ ID NO: 298453 - DNA, 21 bp, Artificial sequence
  SiRNA target sequence
gtatggctatagtctaaattt

SEQ ID NO: 298454 - DNA, 21 bp, Artificial sequence
  SiRNA target sequence
tatggctatagtctaaatttt

SEQ ID NO: 298455 - DNA, 21 bp, Artificial sequence
  SiRNA target sequence
atggctatagtctaaattttt

SEQ ID NO: 298456 - DNA, 21 bp, Artificial sequence
  SiRNA target sequence
tggctatagtctaaatttttc

SEQ ID NO: 298457 - DNA, 21 bp, Artificial sequence
  SiRNA target sequence
ggctatagtctaaatttttca

SEQ ID NO: 298458 - DNA, 21 bp, Artificial sequence
  SiRNA target sequence
gctatagtctaaatttttcag

SEQ ID NO: 298459 - DNA, 21 bp, Artificial sequence
  SiRNA target sequence
ctatagtctaaatttttcaga

SEQ ID NO: 298460 - DNA, 21 bp, Artificial sequence
  SiRNA target sequence
tatagtctaaatttttcagat

SEQ ID NO: 298461 - DNA, 21 bp, Artificial sequence
  SiRNA target sequence
atagtctaaatttttcagata

SEQ ID NO: 298462 - DNA, 21 bp, Artificial sequence
  SiRNA target sequence
tagtctaaatttttcagataa

SEQ ID NO: 298463 - DNA, 21 bp, Artificial sequence
  SiRNA target sequence
agtctaaatttttcagataat

SEQ ID NO: 298464 - DNA, 21 bp, Artificial sequence
  SiRNA target sequence
gtctaaatttttcagataatt

SEQ ID NO: 298465 - DNA, 21 bp, Artificial sequence
  SiRNA target sequence
tctaaatttttcagataattt

SEQ ID NO: 298466 - DNA, 21 bp, Artificial sequence
  SiRNA target sequence
ctaaatttttcagataatttc

SEQ ID NO: 298467 - DNA, 21 bp, Artificial sequence
  SiRNA target sequence
taaatttttcagataatttca

SEQ ID NO: 298468 - DNA, 21 bp, Artificial sequence
  SiRNA target sequence
aaatttttcagataatttcaa

SEQ ID NO: 298469 - DNA, 21 bp, Artificial sequence
  SiRNA target sequence
aatttttcagataatttcaat

SEQ ID NO: 298470 - DNA, 21 bp, Artificial sequence
  SiRNA target sequence
atttttcagataatttcaatt

SEQ ID NO: 298471 - DNA, 21 bp, Artificial sequence
  SiRNA target sequence
tttttcagataatttcaattt

SEQ ID NO: 298472 - DNA, 21 bp, Artificial sequence
  SiRNA target sequence
ttttcagataatttcaatttg

SEQ ID NO: 298473 - DNA, 21 bp, Artificial sequence
  SiRNA target sequence
tttcagataatttcaatttgg

SEQ ID NO: 298474 - DNA, 21 bp, Artificial sequence
  SiRNA target sequence
ttcagataatttcaatttgga

SEQ ID NO: 298475 - DNA, 21 bp, Artificial sequence
  SiRNA target sequence
tcagataatttcaatttggac

SEQ ID NO: 298476 - DNA, 21 bp, Artificial sequence
  SiRNA target sequence
cagataatttcaatttggacc

SEQ ID NO: 298477 - DNA, 21 bp, Artificial sequence
  SiRNA target sequence
agataatttcaatttggaccg

SEQ ID NO: 298478 - DNA, 21 bp, Artificial sequence
  SiRNA target sequence
gataatttcaatttggaccga

SEQ ID NO: 298479 - DNA, 21 bp, Artificial sequence
  SiRNA target sequence
ataatttcaatttggaccgaa

SEQ ID NO: 298480 - DNA, 21 bp, Artificial sequence
  SiRNA target sequence
taatttcaatttggaccgaaa

SEQ ID NO: 298481 - DNA, 21 bp, Artificial sequence
  SiRNA target sequence
aatttcaatttggaccgaaaa

SEQ ID NO: 298482 - DNA, 21 bp, Artificial sequence
  SiRNA target sequence
atttcaatttggaccgaaaaa

SEQ ID NO: 298483 - DNA, 21 bp, Artificial sequence
  SiRNA target sequence
tttcaatttggaccgaaaaac

SEQ ID NO: 298484 - DNA, 21 bp, Artificial sequence
  SiRNA target sequence
ttcaatttggaccgaaaaacc

SEQ ID NO: 298485 - DNA, 21 bp, Artificial sequence
  SiRNA target sequence
tcaatttggaccgaaaaaccg

SEQ ID NO: 298486 - DNA, 21 bp, Artificial sequence
  SiRNA target sequence
caatttggaccgaaaaaccga

SEQ ID NO: 298487 - DNA, 21 bp, Artificial sequence
  SiRNA target sequence
aatttggaccgaaaaaccgag

SEQ ID NO: 298488 - DNA, 21 bp, Artificial sequence
  SiRNA target sequence
atttggaccgaaaaaccgagc

SEQ ID NO: 298489 - DNA, 21 bp, Artificial sequence
  SiRNA target sequence
tttggaccgaaaaaccgagca

SEQ ID NO: 298490 - DNA, 21 bp, Artificial sequence
  SiRNA target sequence
ttggaccgaaaaaccgagcaa

SEQ ID NO: 298491 - DNA, 21 bp, Artificial sequence
  SiRNA target sequence
tggaccgaaaaaccgagcaat

SEQ ID NO: 298492 - DNA, 21 bp, Artificial sequence
  SiRNA target sequence
ggaccgaaaaaccgagcaata

SEQ ID NO: 298493 - DNA, 21 bp, Artificial sequence
  SiRNA target sequence
gaccgaaaaaccgagcaatag

SEQ ID NO: 298494 - DNA, 21 bp, Artificial sequence
  SiRNA target sequence
accgaaaaaccgagcaatagg

SEQ ID NO: 298495 - DNA, 21 bp, Artificial sequence
  SiRNA target sequence
ccgaaaaaccgagcaatagga

SEQ ID NO: 298496 - DNA, 21 bp, Artificial sequence
  SiRNA target sequence
cgaaaaaccgagcaataggag

SEQ ID NO: 298497 - DNA, 21 bp, Artificial sequence
  SiRNA target sequence
gaaaaaccgagcaataggagc

SEQ ID NO: 298498 - DNA, 21 bp, Artificial sequence
  SiRNA target sequence
aaaaaccgagcaataggagca

SEQ ID NO: 298499 - DNA, 21 bp, Artificial sequence
  SiRNA target sequence
aaaaccgagcaataggagcac

SEQ ID NO: 298500 - DNA, 21 bp, Artificial sequence
  SiRNA target sequence
aaaccgagcaataggagcact

SEQ ID NO: 298501 - DNA, 21 bp, Artificial sequence
  SiRNA target sequence
aaccgagcaataggagcacta

SEQ ID NO: 298502 - DNA, 21 bp, Artificial sequence
  SiRNA target sequence
accgagcaataggagcactat

SEQ ID NO: 298503 - DNA, 21 bp, Artificial sequence
  SiRNA target sequence
ccgagcaataggagcactatg

SEQ ID NO: 298504 - DNA, 21 bp, Artificial sequence
  SiRNA target sequence
cgagcaataggagcactatgg

SEQ ID NO: 298505 - DNA, 21 bp, Artificial sequence
  SiRNA target sequence
gagcaataggagcactatggt

SEQ ID NO: 298506 - DNA, 21 bp, Artificial sequence
  SiRNA target sequence
agcaataggagcactatggtt

SEQ ID NO: 298507 - DNA, 21 bp, Artificial sequence
  SiRNA target sequence
gcaataggagcactatggttc

SEQ ID NO: 298508 - DNA, 21 bp, Artificial sequence
  SiRNA target sequence
caataggagcactatggttcg

SEQ ID NO: 298509 - DNA, 21 bp, Artificial sequence
  SiRNA target sequence
aataggagcactatggttcga

SEQ ID NO: 298510 - DNA, 21 bp, Artificial sequence
  SiRNA target sequence
ataggagcactatggttcgag

SEQ ID NO: 298511 - DNA, 21 bp, Artificial sequence
  SiRNA target sequence
taggagcactatggttcgaga

SEQ ID NO: 298512 - DNA, 21 bp, Artificial sequence
  SiRNA target sequence
aggagcactatggttcgagaa

SEQ ID NO: 298513 - DNA, 21 bp, Artificial sequence
  SiRNA target sequence
ggagcactatggttcgagaag

SEQ ID NO: 298514 - DNA, 21 bp, Artificial sequence
  SiRNA target sequence
gagcactatggttcgagaaga

SEQ ID NO: 298515 - DNA, 21 bp, Artificial sequence
  SiRNA target sequence
agcactatggttcgagaagac

SEQ ID NO: 298516 - DNA, 21 bp, Artificial sequence
  SiRNA target sequence
gcactatggttcgagaagaca

SEQ ID NO: 298517 - DNA, 21 bp, Artificial sequence
  SiRNA target sequence
cactatggttcgagaagacat

SEQ ID NO: 298518 - DNA, 21 bp, Artificial sequence
  SiRNA target sequence
actatggttcgagaagacatt

SEQ ID NO: 298519 - DNA, 21 bp, Artificial sequence
  SiRNA target sequence
ctatggttcgagaagacatta

SEQ ID NO: 298520 - DNA, 21 bp, Artificial sequence
  SiRNA target sequence
tatggttcgagaagacattat

SEQ ID NO: 298521 - DNA, 21 bp, Artificial sequence
  SiRNA target sequence
atggttcgagaagacattata

SEQ ID NO: 298522 - DNA, 21 bp, Artificial sequence
  SiRNA target sequence
tggttcgagaagacattataa

SEQ ID NO: 298523 - DNA, 21 bp, Artificial sequence
  SiRNA target sequence
ggttcgagaagacattataag

SEQ ID NO: 298524 - DNA, 21 bp, Artificial sequence
  SiRNA target sequence
gttcgagaagacattataaga

SEQ ID NO: 298525 - DNA, 21 bp, Artificial sequence
  SiRNA target sequence
ttcgagaagacattataagac

SEQ ID NO: 298526 - DNA, 21 bp, Artificial sequence
  SiRNA target sequence
tcgagaagacattataagaca

SEQ ID NO: 298527 - DNA, 21 bp, Artificial sequence
  SiRNA target sequence
cgagaagacattataagacaa

SEQ ID NO: 298528 - DNA, 21 bp, Artificial sequence
  SiRNA target sequence
gagaagacattataagacaaa

SEQ ID NO: 298529 - DNA, 21 bp, Artificial sequence
  SiRNA target sequence
agaagacattataagacaaac

SEQ ID NO: 298530 - DNA, 21 bp, Artificial sequence
  SiRNA target sequence
gaagacattataagacaaact

SEQ ID NO: 298531 - DNA, 21 bp, Artificial sequence
  SiRNA target sequence
aagacattataagacaaactc

SEQ ID NO: 298532 - DNA, 21 bp, Artificial sequence
  SiRNA target sequence
agacattataagacaaactca

SEQ ID NO: 298533 - DNA, 21 bp, Artificial sequence
  SiRNA target sequence
gacattataagacaaactcac

SEQ ID NO: 298534 - DNA, 21 bp, Artificial sequence
  SiRNA target sequence
acattataagacaaactcact

SEQ ID NO: 298535 - DNA, 21 bp, Artificial sequence
  SiRNA target sequence
cattataagacaaactcacta

SEQ ID NO: 298536 - DNA, 21 bp, Artificial sequence
  SiRNA target sequence
attataagacaaactcactag

SEQ ID NO: 298537 - DNA, 21 bp, Artificial sequence
  SiRNA target sequence
ttataagacaaactcactaga

SEQ ID NO: 298538 - DNA, 21 bp, Artificial sequence
  SiRNA target sequence
tataagacaaactcactagat

SEQ ID NO: 298539 - DNA, 21 bp, Artificial sequence
  SiRNA target sequence
ataagacaaactcactagatg

SEQ ID NO: 298540 - DNA, 21 bp, Artificial sequence
  SiRNA target sequence
taagacaaactcactagatgg

SEQ ID NO: 298541 - DNA, 21 bp, Artificial sequence
  SiRNA target sequence
aagacaaactcactagatgga

SEQ ID NO: 298542 - DNA, 21 bp, Artificial sequence
  SiRNA target sequence
agacaaactcactagatggag

SEQ ID NO: 298543 - DNA, 21 bp, Artificial sequence
  SiRNA target sequence
gacaaactcactagatggagg

SEQ ID NO: 298544 - DNA, 21 bp, Artificial sequence
  SiRNA target sequence
acaaactcactagatggaggg

SEQ ID NO: 298545 - DNA, 21 bp, Artificial sequence
  SiRNA target sequence
caaactcactagatggagggc

SEQ ID NO: 298546 - DNA, 21 bp, Artificial sequence
  SiRNA target sequence
aaactcactagatggagggct

SEQ ID NO: 298547 - DNA, 21 bp, Artificial sequence
  SiRNA target sequence
aactcactagatggagggctt

SEQ ID NO: 298548 - DNA, 21 bp, Artificial sequence
  SiRNA target sequence
actcactagatggagggctta

SEQ ID NO: 298549 - DNA, 21 bp, Artificial sequence
  SiRNA target sequence
ctcactagatggagggcttat

SEQ ID NO: 298550 - DNA, 21 bp, Artificial sequence
  SiRNA target sequence
tcactagatggagggcttata

SEQ ID NO: 298551 - DNA, 21 bp, Artificial sequence
  SiRNA target sequence
cactagatggagggcttataa

SEQ ID NO: 298552 - DNA, 21 bp, Artificial sequence
  SiRNA target sequence
actagatggagggcttataat

SEQ ID NO: 298553 - DNA, 21 bp, Artificial sequence
  SiRNA target sequence
ctagatggagggcttataatt

SEQ ID NO: 298554 - DNA, 21 bp, Artificial sequence
  SiRNA target sequence
tagatggagggcttataatta

SEQ ID NO: 298555 - DNA, 21 bp, Artificial sequence
  SiRNA target sequence
agatggagggcttataattat

SEQ ID NO: 298556 - DNA, 21 bp, Artificial sequence
  SiRNA target sequence
gatggagggcttataattata

SEQ ID NO: 298557 - DNA, 21 bp, Artificial sequence
  SiRNA target sequence
atggagggcttataattataa

SEQ ID NO: 298558 - DNA, 21 bp, Artificial sequence
  SiRNA target sequence
tggagggcttataattataag

SEQ ID NO: 298559 - DNA, 21 bp, Artificial sequence
  SiRNA target sequence
ggagggcttataattataagc

SEQ ID NO: 298560 - DNA, 21 bp, Artificial sequence
  SiRNA target sequence
gagggcttataattataagct

SEQ ID NO: 298561 - DNA, 21 bp, Artificial sequence
  SiRNA target sequence
agggcttataattataagctt

SEQ ID NO: 298562 - DNA, 21 bp, Artificial sequence
  SiRNA target sequence
gggcttataattataagcttc

SEQ ID NO: 298563 - DNA, 21 bp, Artificial sequence
  SiRNA target sequence
ggcttataattataagcttct

SEQ ID NO: 298564 - DNA, 21 bp, Artificial sequence
  SiRNA target sequence
gcttataattataagcttctt

SEQ ID NO: 298565 - DNA, 21 bp, Artificial sequence
  SiRNA target sequence
cttataattataagcttcttg

SEQ ID NO: 298566 - DNA, 21 bp, Artificial sequence
  SiRNA target sequence
ttataattataagcttcttga

SEQ ID NO: 298567 - DNA, 21 bp, Artificial sequence
  SiRNA target sequence
tataattataagcttcttgac

SEQ ID NO: 298568 - DNA, 21 bp, Artificial sequence
  SiRNA target sequence
ataattataagcttcttgaca

SEQ ID NO: 298569 - DNA, 21 bp, Artificial sequence
  SiRNA target sequence
taattataagcttcttgacat

SEQ ID NO: 298570 - DNA, 21 bp, Artificial sequence
  SiRNA target sequence
aattataagcttcttgacata

SEQ ID NO: 298571 - DNA, 21 bp, Artificial sequence
  SiRNA target sequence
attataagcttcttgacataa

SEQ ID NO: 298572 - DNA, 21 bp, Artificial sequence
  SiRNA target sequence
ttataagcttcttgacataat

SEQ ID NO: 298573 - DNA, 21 bp, Artificial sequence
  SiRNA target sequence
tataagcttcttgacataatc

SEQ ID NO: 298574 - DNA, 21 bp, Artificial sequence
  SiRNA target sequence
ataagcttcttgacataatct

SEQ ID NO: 298575 - DNA, 21 bp, Artificial sequence
  SiRNA target sequence
taagcttcttgacataatcta

SEQ ID NO: 298576 - DNA, 21 bp, Artificial sequence
  SiRNA target sequence
aagcttcttgacataatctaa

SEQ ID NO: 298577 - DNA, 21 bp, Artificial sequence
  SiRNA target sequence
agcttcttgacataatctaac

SEQ ID NO: 298578 - DNA, 21 bp, Artificial sequence
  SiRNA target sequence
gcttcttgacataatctaacc

SEQ ID NO: 298579 - DNA, 21 bp, Artificial sequence
  SiRNA target sequence
cttcttgacataatctaacca

SEQ ID NO: 298580 - DNA, 21 bp, Artificial sequence
  SiRNA target sequence
ttcttgacataatctaaccat

SEQ ID NO: 298581 - DNA, 21 bp, Artificial sequence
  SiRNA target sequence
tcttgacataatctaaccatt

SEQ ID NO: 298582 - DNA, 21 bp, Artificial sequence
  SiRNA target sequence
cttgacataatctaaccattg

SEQ ID NO: 298583 - DNA, 21 bp, Artificial sequence
  SiRNA target sequence
ttgacataatctaaccattgc

SEQ ID NO: 298584 - DNA, 21 bp, Artificial sequence
  SiRNA target sequence
tgacataatctaaccattgcg

SEQ ID NO: 298585 - DNA, 21 bp, Artificial sequence
  SiRNA target sequence
gacataatctaaccattgcgt

SEQ ID NO: 298586 - DNA, 21 bp, Artificial sequence
  SiRNA target sequence
acataatctaaccattgcgtc

SEQ ID NO: 298587 - DNA, 21 bp, Artificial sequence
  SiRNA target sequence
cataatctaaccattgcgtca

SEQ ID NO: 298588 - DNA, 21 bp, Artificial sequence
  SiRNA target sequence
ataatctaaccattgcgtcaa

SEQ ID NO: 298589 - DNA, 21 bp, Artificial sequence
  SiRNA target sequence
taatctaaccattgcgtcaaa

SEQ ID NO: 298590 - DNA, 21 bp, Artificial sequence
  SiRNA target sequence
aatctaaccattgcgtcaaaa

SEQ ID NO: 298591 - DNA, 21 bp, Artificial sequence
  SiRNA target sequence
atctaaccattgcgtcaaaat

SEQ ID NO: 298592 - DNA, 21 bp, Artificial sequence
  SiRNA target sequence
tctaaccattgcgtcaaaatt

SEQ ID NO: 298593 - DNA, 21 bp, Artificial sequence
  SiRNA target sequence
ctaaccattgcgtcaaaattt

SEQ ID NO: 298594 - DNA, 21 bp, Artificial sequence
  SiRNA target sequence
taaccattgcgtcaaaatttc

SEQ ID NO: 298595 - DNA, 21 bp, Artificial sequence
  SiRNA target sequence
aaccattgcgtcaaaatttcg

SEQ ID NO: 298596 - DNA, 21 bp, Artificial sequence
  SiRNA target sequence
accattgcgtcaaaatttcga

SEQ ID NO: 298597 - DNA, 21 bp, Artificial sequence
  SiRNA target sequence
ccattgcgtcaaaatttcgaa

SEQ ID NO: 298598 - DNA, 21 bp, Artificial sequence
  SiRNA target sequence
cattgcgtcaaaatttcgaat

SEQ ID NO: 298599 - DNA, 21 bp, Artificial sequence
  SiRNA target sequence
attgcgtcaaaatttcgaatt

SEQ ID NO: 298600 - DNA, 21 bp, Artificial sequence
  SiRNA target sequence
ttgcgtcaaaatttcgaatta

SEQ ID NO: 298601 - DNA, 21 bp, Artificial sequence
  SiRNA target sequence
tgcgtcaaaatttcgaattag

SEQ ID NO: 298602 - DNA, 21 bp, Artificial sequence
  SiRNA target sequence
gcgtcaaaatttcgaattagt

SEQ ID NO: 298603 - DNA, 21 bp, Artificial sequence
  SiRNA target sequence
cgtcaaaatttcgaattagta

SEQ ID NO: 298604 - DNA, 21 bp, Artificial sequence
  SiRNA target sequence
gtcaaaatttcgaattagtaa

SEQ ID NO: 298605 - DNA, 21 bp, Artificial sequence
  SiRNA target sequence
tcaaaatttcgaattagtaaa

SEQ ID NO: 298606 - DNA, 21 bp, Artificial sequence
  SiRNA target sequence
caaaatttcgaattagtaaat

SEQ ID NO: 298607 - DNA, 21 bp, Artificial sequence
  SiRNA target sequence
aaaatttcgaattagtaaatt

SEQ ID NO: 298608 - DNA, 21 bp, Artificial sequence
  SiRNA target sequence
aaatttcgaattagtaaatta

SEQ ID NO: 298609 - DNA, 21 bp, Artificial sequence
  SiRNA target sequence
aatttcgaattagtaaattaa

SEQ ID NO: 298610 - DNA, 21 bp, Artificial sequence
  SiRNA target sequence
atttcgaattagtaaattaaa

SEQ ID NO: 298611 - DNA, 21 bp, Artificial sequence
  SiRNA target sequence
tttcgaattagtaaattaaaa

SEQ ID NO: 298612 - DNA, 21 bp, Artificial sequence
  SiRNA target sequence
ttcgaattagtaaattaaaaa

SEQ ID NO: 298613 - DNA, 21 bp, Artificial sequence
  SiRNA target sequence
tcgaattagtaaattaaaaaa

SEQ ID NO: 298614 - DNA, 21 bp, Artificial sequence
  SiRNA target sequence
cgaattagtaaattaaaaaaa

SEQ ID NO: 298615 - DNA, 21 bp, Artificial sequence
  SiRNA target sequence
gatgaacgtcgacctattgaa

SEQ ID NO: 298616 - DNA, 21 bp, Artificial sequence
  SiRNA target sequence
atgaacgtcgacctattgaaa

SEQ ID NO: 298617 - DNA, 21 bp, Artificial sequence
  SiRNA target sequence
tgaacgtcgacctattgaaaa

SEQ ID NO: 298618 - DNA, 21 bp, Artificial sequence
  SiRNA target sequence
gaacgtcgacctattgaaaaa

SEQ ID NO: 298619 - DNA, 21 bp, Artificial sequence
  SiRNA target sequence
aacgtcgacctattgaaaaag

SEQ ID NO: 298620 - DNA, 21 bp, Artificial sequence
  SiRNA target sequence
acgtcgacctattgaaaaagt

SEQ ID NO: 298621 - DNA, 21 bp, Artificial sequence
  SiRNA target sequence
cgtcgacctattgaaaaagtt

SEQ ID NO: 298622 - DNA, 21 bp, Artificial sequence
  SiRNA target sequence
gtcgacctattgaaaaagtta

SEQ ID NO: 298623 - DNA, 21 bp, Artificial sequence
  SiRNA target sequence
tcgacctattgaaaaagttaa

SEQ ID NO: 298624 - DNA, 21 bp, Artificial sequence
  SiRNA target sequence
cgacctattgaaaaagttaat

SEQ ID NO: 298625 - DNA, 21 bp, Artificial sequence
  SiRNA target sequence
gacctattgaaaaagttaatc

SEQ ID NO: 298626 - DNA, 21 bp, Artificial sequence
  SiRNA target sequence
acctattgaaaaagttaatca

SEQ ID NO: 298627 - DNA, 21 bp, Artificial sequence
  SiRNA target sequence
cctattgaaaaagttaatcaa

SEQ ID NO: 298628 - DNA, 21 bp, Artificial sequence
  SiRNA target sequence
ctattgaaaaagttaatcaat

SEQ ID NO: 298629 - DNA, 21 bp, Artificial sequence
  SiRNA target sequence
tattgaaaaagttaatcaatt

SEQ ID NO: 298630 - DNA, 21 bp, Artificial sequence
  SiRNA target sequence
attgaaaaagttaatcaattg

SEQ ID NO: 298631 - DNA, 21 bp, Artificial sequence
  SiRNA target sequence
ttgaaaaagttaatcaattga

SEQ ID NO: 298632 - DNA, 21 bp, Artificial sequence
  SiRNA target sequence
tgaaaaagttaatcaattgaa

SEQ ID NO: 298633 - DNA, 21 bp, Artificial sequence
  SiRNA target sequence
gaaaaagttaatcaattgaaa

SEQ ID NO: 298634 - DNA, 21 bp, Artificial sequence
  SiRNA target sequence
aaaaagttaatcaattgaaaa

SEQ ID NO: 298635 - DNA, 21 bp, Artificial sequence
  SiRNA target sequence
aaaagttaatcaattgaaaac

SEQ ID NO: 298636 - DNA, 21 bp, Artificial sequence
  SiRNA target sequence
aaagttaatcaattgaaaaca

SEQ ID NO: 298637 - DNA, 21 bp, Artificial sequence
  SiRNA target sequence
aagttaatcaattgaaaacac

SEQ ID NO: 298638 - DNA, 21 bp, Artificial sequence
  SiRNA target sequence
agttaatcaattgaaaacacg

SEQ ID NO: 298639 - DNA, 21 bp, Artificial sequence
  SiRNA target sequence
gttaatcaattgaaaacacga

SEQ ID NO: 298640 - DNA, 21 bp, Artificial sequence
  SiRNA target sequence
ttaatcaattgaaaacacgag

SEQ ID NO: 298641 - DNA, 21 bp, Artificial sequence
  SiRNA target sequence
taatcaattgaaaacacgagt

SEQ ID NO: 298642 - DNA, 21 bp, Artificial sequence
  SiRNA target sequence
aatcaattgaaaacacgagta

SEQ ID NO: 298643 - DNA, 21 bp, Artificial sequence
  SiRNA target sequence
atcaattgaaaacacgagtat

SEQ ID NO: 298644 - DNA, 21 bp, Artificial sequence
  SiRNA target sequence
tcaattgaaaacacgagtatt

SEQ ID NO: 298645 - DNA, 21 bp, Artificial sequence
  SiRNA target sequence
caattgaaaacacgagtattc

SEQ ID NO: 298646 - DNA, 21 bp, Artificial sequence
  SiRNA target sequence
aattgaaaacacgagtattct

SEQ ID NO: 298647 - DNA, 21 bp, Artificial sequence
  SiRNA target sequence
attgaaaacacgagtattctc

SEQ ID NO: 298648 - DNA, 21 bp, Artificial sequence
  SiRNA target sequence
ttgaaaacacgagtattctca

SEQ ID NO: 298649 - DNA, 21 bp, Artificial sequence
  SiRNA target sequence
tgaaaacacgagtattctcaa

SEQ ID NO: 298650 - DNA, 21 bp, Artificial sequence
  SiRNA target sequence
gaaaacacgagtattctcaaa

SEQ ID NO: 298651 - DNA, 21 bp, Artificial sequence
  SiRNA target sequence
aaaacacgagtattctcaaat

SEQ ID NO: 298652 - DNA, 21 bp, Artificial sequence
  SiRNA target sequence
aaacacgagtattctcaaatg

SEQ ID NO: 298653 - DNA, 21 bp, Artificial sequence
  SiRNA target sequence
aacacgagtattctcaaatgg

SEQ ID NO: 298654 - DNA, 21 bp, Artificial sequence
  SiRNA target sequence
acacgagtattctcaaatgga

SEQ ID NO: 298655 - DNA, 21 bp, Artificial sequence
  SiRNA target sequence
cacgagtattctcaaatggac

SEQ ID NO: 298656 - DNA, 21 bp, Artificial sequence
  SiRNA target sequence
acgagtattctcaaatggacc

SEQ ID NO: 298657 - DNA, 21 bp, Artificial sequence
  SiRNA target sequence
cgagtattctcaaatggacca

SEQ ID NO: 298658 - DNA, 21 bp, Artificial sequence
  SiRNA target sequence
gagtattctcaaatggaccaa

SEQ ID NO: 298659 - DNA, 21 bp, Artificial sequence
  SiRNA target sequence
agtattctcaaatggaccaat

SEQ ID NO: 298660 - DNA, 21 bp, Artificial sequence
  SiRNA target sequence
gtattctcaaatggaccaatg

SEQ ID NO: 298661 - DNA, 21 bp, Artificial sequence
  SiRNA target sequence
tattctcaaatggaccaatgg

SEQ ID NO: 298662 - DNA, 21 bp, Artificial sequence
  SiRNA target sequence
attctcaaatggaccaatgga

SEQ ID NO: 298663 - DNA, 21 bp, Artificial sequence
  SiRNA target sequence
ttctcaaatggaccaatggac

SEQ ID NO: 298664 - DNA, 21 bp, Artificial sequence
  SiRNA target sequence
tctcaaatggaccaatggact

SEQ ID NO: 298665 - DNA, 21 bp, Artificial sequence
  SiRNA target sequence
ctcaaatggaccaatggactt

SEQ ID NO: 298666 - DNA, 21 bp, Artificial sequence
  SiRNA target sequence
tcaaatggaccaatggacttc

SEQ ID NO: 298667 - DNA, 21 bp, Artificial sequence
  SiRNA target sequence
caaatggaccaatggacttct

SEQ ID NO: 298668 - DNA, 21 bp, Artificial sequence
  SiRNA target sequence
aaatggaccaatggacttctc

SEQ ID NO: 298669 - DNA, 21 bp, Artificial sequence
  SiRNA target sequence
aatggaccaatggacttctca

SEQ ID NO: 298670 - DNA, 21 bp, Artificial sequence
  SiRNA target sequence
atggaccaatggacttctcaa

SEQ ID NO: 298671 - DNA, 21 bp, Artificial sequence
  SiRNA target sequence
tggaccaatggacttctcaat

SEQ ID NO: 298672 - DNA, 21 bp, Artificial sequence
  SiRNA target sequence
ggaccaatggacttctcaatt

SEQ ID NO: 298673 - DNA, 21 bp, Artificial sequence
  SiRNA target sequence
gaccaatggacttctcaattg

SEQ ID NO: 298674 - DNA, 21 bp, Artificial sequence
  SiRNA target sequence
accaatggacttctcaattgc

SEQ ID NO: 298675 - DNA, 21 bp, Artificial sequence
  SiRNA target sequence
ccaatggacttctcaattgcg

SEQ ID NO: 298676 - DNA, 21 bp, Artificial sequence
  SiRNA target sequence
caatggacttctcaattgcgt

SEQ ID NO: 298677 - DNA, 21 bp, Artificial sequence
  SiRNA target sequence
aatggacttctcaattgcgtt

SEQ ID NO: 298678 - DNA, 21 bp, Artificial sequence
  SiRNA target sequence
atggacttctcaattgcgttt

SEQ ID NO: 298679 - DNA, 21 bp, Artificial sequence
  SiRNA target sequence
tggacttctcaattgcgtttc

SEQ ID NO: 298680 - DNA, 21 bp, Artificial sequence
  SiRNA target sequence
ggacttctcaattgcgtttcg

SEQ ID NO: 298681 - DNA, 21 bp, Artificial sequence
  SiRNA target sequence
gacttctcaattgcgtttcga

SEQ ID NO: 298682 - DNA, 21 bp, Artificial sequence
  SiRNA target sequence
acttctcaattgcgtttcgaa

SEQ ID NO: 298683 - DNA, 21 bp, Artificial sequence
  SiRNA target sequence
cttctcaattgcgtttcgaat

SEQ ID NO: 298684 - DNA, 21 bp, Artificial sequence
  SiRNA target sequence
ttctcaattgcgtttcgaatg

SEQ ID NO: 298685 - DNA, 21 bp, Artificial sequence
  SiRNA target sequence
tctcaattgcgtttcgaatgt

SEQ ID NO: 298686 - DNA, 21 bp, Artificial sequence
  SiRNA target sequence
ctcaattgcgtttcgaatgta

SEQ ID NO: 298687 - DNA, 21 bp, Artificial sequence
  SiRNA target sequence
tcaattgcgtttcgaatgtat

SEQ ID NO: 298688 - DNA, 21 bp, Artificial sequence
  SiRNA target sequence
caattgcgtttcgaatgtatt

SEQ ID NO: 298689 - DNA, 21 bp, Artificial sequence
  SiRNA target sequence
aattgcgtttcgaatgtatta

SEQ ID NO: 298690 - DNA, 21 bp, Artificial sequence
  SiRNA target sequence
attgcgtttcgaatgtattat

SEQ ID NO: 298691 - DNA, 21 bp, Artificial sequence
  SiRNA target sequence
ttgcgtttcgaatgtattatt

SEQ ID NO: 298692 - DNA, 21 bp, Artificial sequence
  SiRNA target sequence
tgcgtttcgaatgtattattt

SEQ ID NO: 298693 - DNA, 21 bp, Artificial sequence
  SiRNA target sequence
gcgtttcgaatgtattatttg

SEQ ID NO: 298694 - DNA, 21 bp, Artificial sequence
  SiRNA target sequence
cgtttcgaatgtattatttgg

SEQ ID NO: 298695 - DNA, 21 bp, Artificial sequence
  SiRNA target sequence
gtttcgaatgtattatttggg

SEQ ID NO: 298696 - DNA, 21 bp, Artificial sequence
  SiRNA target sequence
tttcgaatgtattatttgggc

SEQ ID NO: 298697 - DNA, 21 bp, Artificial sequence
  SiRNA target sequence
ttcgaatgtattatttgggct

SEQ ID NO: 298698 - DNA, 21 bp, Artificial sequence
  SiRNA target sequence
tcgaatgtattatttgggctt

SEQ ID NO: 298699 - DNA, 21 bp, Artificial sequence
  SiRNA target sequence
cgaatgtattatttgggcttt

SEQ ID NO: 298700 - DNA, 21 bp, Artificial sequence
  SiRNA target sequence
gaatgtattatttgggcttta

SEQ ID NO: 298701 - DNA, 21 bp, Artificial sequence
  SiRNA target sequence
aatgtattatttgggctttat

SEQ ID NO: 298702 - DNA, 21 bp, Artificial sequence
  SiRNA target sequence
atgtattatttgggctttata

SEQ ID NO: 298703 - DNA, 21 bp, Artificial sequence
  SiRNA target sequence
tgtattatttgggctttatag

SEQ ID NO: 298704 - DNA, 21 bp, Artificial sequence
  SiRNA target sequence
gtattatttgggctttatagc

SEQ ID NO: 298705 - DNA, 21 bp, Artificial sequence
  SiRNA target sequence
tattatttgggctttatagct

SEQ ID NO: 298706 - DNA, 21 bp, Artificial sequence
  SiRNA target sequence
attatttgggctttatagctc

SEQ ID NO: 298707 - DNA, 21 bp, Artificial sequence
  SiRNA target sequence
ttatttgggctttatagctca

SEQ ID NO: 298708 - DNA, 21 bp, Artificial sequence
  SiRNA target sequence
tatttgggctttatagctcat

SEQ ID NO: 298709 - DNA, 21 bp, Artificial sequence
  SiRNA target sequence
atttgggctttatagctcatt

SEQ ID NO: 298710 - DNA, 21 bp, Artificial sequence
  SiRNA target sequence
tttgggctttatagctcattt

SEQ ID NO: 298711 - DNA, 21 bp, Artificial sequence
  SiRNA target sequence
ttgggctttatagctcatttg

SEQ ID NO: 298712 - DNA, 21 bp, Artificial sequence
  SiRNA target sequence
tgggctttatagctcatttga

SEQ ID NO: 298713 - DNA, 21 bp, Artificial sequence
  SiRNA target sequence
gggctttatagctcatttgat

SEQ ID NO: 298714 - DNA, 21 bp, Artificial sequence
  SiRNA target sequence
ggctttatagctcatttgatg

SEQ ID NO: 298715 - DNA, 21 bp, Artificial sequence
  SiRNA target sequence
gctttatagctcatttgatgg

SEQ ID NO: 298716 - DNA, 21 bp, Artificial sequence
  SiRNA target sequence
ctttatagctcatttgatgga

SEQ ID NO: 298717 - DNA, 21 bp, Artificial sequence
  SiRNA target sequence
tttatagctcatttgatggag

SEQ ID NO: 298718 - DNA, 21 bp, Artificial sequence
  SiRNA target sequence
ttatagctcatttgatggaga

SEQ ID NO: 298719 - DNA, 21 bp, Artificial sequence
  SiRNA target sequence
tatagctcatttgatggagaa

SEQ ID NO: 298720 - DNA, 21 bp, Artificial sequence
  SiRNA target sequence
atagctcatttgatggagaat

SEQ ID NO: 298721 - DNA, 21 bp, Artificial sequence
  SiRNA target sequence
tagctcatttgatggagaatc

SEQ ID NO: 298722 - DNA, 21 bp, Artificial sequence
  SiRNA target sequence
agctcatttgatggagaatcg

SEQ ID NO: 298723 - DNA, 21 bp, Artificial sequence
  SiRNA target sequence
gctcatttgatggagaatcga

SEQ ID NO: 298724 - DNA, 21 bp, Artificial sequence
  SiRNA target sequence
ctcatttgatggagaatcgaa

SEQ ID NO: 298725 - DNA, 21 bp, Artificial sequence
  SiRNA target sequence
tcatttgatggagaatcgaat

SEQ ID NO: 298726 - DNA, 21 bp, Artificial sequence
  SiRNA target sequence
catttgatggagaatcgaatt

SEQ ID NO: 298727 - DNA, 21 bp, Artificial sequence
  SiRNA target sequence
atttgatggagaatcgaattg

SEQ ID NO: 298728 - DNA, 21 bp, Artificial sequence
  SiRNA target sequence
tttgatggagaatcgaattgc

SEQ ID NO: 298729 - DNA, 21 bp, Artificial sequence
  SiRNA target sequence
ttgatggagaatcgaattgca

SEQ ID NO: 298730 - DNA, 21 bp, Artificial sequence
  SiRNA target sequence
tgatggagaatcgaattgcaa

SEQ ID NO: 298731 - DNA, 21 bp, Artificial sequence
  SiRNA target sequence
gatggagaatcgaattgcaaa

SEQ ID NO: 298732 - DNA, 21 bp, Artificial sequence
  SiRNA target sequence
atggagaatcgaattgcaaat

SEQ ID NO: 298733 - DNA, 21 bp, Artificial sequence
  SiRNA target sequence
tggagaatcgaattgcaaatg

SEQ ID NO: 298734 - DNA, 21 bp, Artificial sequence
  SiRNA target sequence
ggagaatcgaattgcaaatga

SEQ ID NO: 298735 - DNA, 21 bp, Artificial sequence
  SiRNA target sequence
gagaatcgaattgcaaatgaa

SEQ ID NO: 298736 - DNA, 21 bp, Artificial sequence
  SiRNA target sequence
agaatcgaattgcaaatgaag

SEQ ID NO: 298737 - DNA, 21 bp, Artificial sequence
  SiRNA target sequence
gaatcgaattgcaaatgaagt

SEQ ID NO: 298738 - DNA, 21 bp, Artificial sequence
  SiRNA target sequence
aatcgaattgcaaatgaagtg

SEQ ID NO: 298739 - DNA, 21 bp, Artificial sequence
  SiRNA target sequence
atcgaattgcaaatgaagtgt

SEQ ID NO: 298740 - DNA, 21 bp, Artificial sequence
  SiRNA target sequence
tcgaattgcaaatgaagtgtc

SEQ ID NO: 298741 - DNA, 21 bp, Artificial sequence
  SiRNA target sequence
cgaattgcaaatgaagtgtct

SEQ ID NO: 298742 - DNA, 21 bp, Artificial sequence
  SiRNA target sequence
gaattgcaaatgaagtgtcta

SEQ ID NO: 298743 - DNA, 21 bp, Artificial sequence
  SiRNA target sequence
aattgcaaatgaagtgtctat

SEQ ID NO: 298744 - DNA, 21 bp, Artificial sequence
  SiRNA target sequence
attgcaaatgaagtgtctatt

SEQ ID NO: 298745 - DNA, 21 bp, Artificial sequence
  SiRNA target sequence
ttgcaaatgaagtgtctattg

SEQ ID NO: 298746 - DNA, 21 bp, Artificial sequence
  SiRNA target sequence
tgcaaatgaagtgtctattgg

SEQ ID NO: 298747 - DNA, 21 bp, Artificial sequence
  SiRNA target sequence
gcaaatgaagtgtctattgga

SEQ ID NO: 298748 - DNA, 21 bp, Artificial sequence
  SiRNA target sequence
caaatgaagtgtctattggaa

SEQ ID NO: 298749 - DNA, 21 bp, Artificial sequence
  SiRNA target sequence
aaatgaagtgtctattggaac

SEQ ID NO: 298750 - DNA, 21 bp, Artificial sequence
  SiRNA target sequence
aatgaagtgtctattggaacg

SEQ ID NO: 298751 - DNA, 21 bp, Artificial sequence
  SiRNA target sequence
atgaagtgtctattggaacga

SEQ ID NO: 298752 - DNA, 21 bp, Artificial sequence
  SiRNA target sequence
tgaagtgtctattggaacgaa

SEQ ID NO: 298753 - DNA, 21 bp, Artificial sequence
  SiRNA target sequence
gaagtgtctattggaacgaat

SEQ ID NO: 298754 - DNA, 21 bp, Artificial sequence
  SiRNA target sequence
aagtgtctattggaacgaatg

SEQ ID NO: 298755 - DNA, 21 bp, Artificial sequence
  SiRNA target sequence
agtgtctattggaacgaatgt

SEQ ID NO: 298756 - DNA, 21 bp, Artificial sequence
  SiRNA target sequence
gtgtctattggaacgaatgtt

SEQ ID NO: 298757 - DNA, 21 bp, Artificial sequence
  SiRNA target sequence
tgtctattggaacgaatgttt

SEQ ID NO: 298758 - DNA, 21 bp, Artificial sequence
  SiRNA target sequence
gtctattggaacgaatgttta

SEQ ID NO: 298759 - DNA, 21 bp, Artificial sequence
  SiRNA target sequence
tctattggaacgaatgtttat

SEQ ID NO: 298760 - DNA, 21 bp, Artificial sequence
  SiRNA target sequence
ctattggaacgaatgtttatt

SEQ ID NO: 298761 - DNA, 21 bp, Artificial sequence
  SiRNA target sequence
tattggaacgaatgtttattc

SEQ ID NO: 298762 - DNA, 21 bp, Artificial sequence
  SiRNA target sequence
attggaacgaatgtttattca

SEQ ID NO: 298763 - DNA, 21 bp, Artificial sequence
  SiRNA target sequence
ttggaacgaatgtttattcac

SEQ ID NO: 298764 - DNA, 21 bp, Artificial sequence
  SiRNA target sequence
tggaacgaatgtttattcaca

SEQ ID NO: 298765 - DNA, 21 bp, Artificial sequence
  SiRNA target sequence
ggaacgaatgtttattcacaa

SEQ ID NO: 298766 - DNA, 21 bp, Artificial sequence
  SiRNA target sequence
gaacgaatgtttattcacaag

SEQ ID NO: 298767 - DNA, 21 bp, Artificial sequence
  SiRNA target sequence
aacgaatgtttattcacaaga

SEQ ID NO: 298768 - DNA, 21 bp, Artificial sequence
  SiRNA target sequence
acgaatgtttattcacaagac

SEQ ID NO: 298769 - DNA, 21 bp, Artificial sequence
  SiRNA target sequence
cgaatgtttattcacaagact

SEQ ID NO: 298770 - DNA, 21 bp, Artificial sequence
  SiRNA target sequence
gaatgtttattcacaagactg

SEQ ID NO: 298771 - DNA, 21 bp, Artificial sequence
  SiRNA target sequence
aatgtttattcacaagactgg

SEQ ID NO: 298772 - DNA, 21 bp, Artificial sequence
  SiRNA target sequence
atgtttattcacaagactgga

SEQ ID NO: 298773 - DNA, 21 bp, Artificial sequence
  SiRNA target sequence
tgtttattcacaagactggag

SEQ ID NO: 298774 - DNA, 21 bp, Artificial sequence
  SiRNA target sequence
gtttattcacaagactggagt

SEQ ID NO: 298775 - DNA, 21 bp, Artificial sequence
  SiRNA target sequence
tttattcacaagactggagta

SEQ ID NO: 298776 - DNA, 21 bp, Artificial sequence
  SiRNA target sequence
ttattcacaagactggagtaa

SEQ ID NO: 298777 - DNA, 21 bp, Artificial sequence
  SiRNA target sequence
tattcacaagactggagtaaa

SEQ ID NO: 298778 - DNA, 21 bp, Artificial sequence
  SiRNA target sequence
attcacaagactggagtaaaa

SEQ ID NO: 298779 - DNA, 21 bp, Artificial sequence
  SiRNA target sequence
ttcacaagactggagtaaaac

SEQ ID NO: 298780 - DNA, 21 bp, Artificial sequence
  SiRNA target sequence
tcacaagactggagtaaaact

SEQ ID NO: 298781 - DNA, 21 bp, Artificial sequence
  SiRNA target sequence
cacaagactggagtaaaactg

SEQ ID NO: 298782 - DNA, 21 bp, Artificial sequence
  SiRNA target sequence
acaagactggagtaaaactgt

SEQ ID NO: 298783 - DNA, 21 bp, Artificial sequence
  SiRNA target sequence
caagactggagtaaaactgtt

SEQ ID NO: 298784 - DNA, 21 bp, Artificial sequence
  SiRNA target sequence
aagactggagtaaaactgtta

SEQ ID NO: 298785 - DNA, 21 bp, Artificial sequence
  SiRNA target sequence
agactggagtaaaactgttag

SEQ ID NO: 298786 - DNA, 21 bp, Artificial sequence
  SiRNA target sequence
gactggagtaaaactgttagg

SEQ ID NO: 298787 - DNA, 21 bp, Artificial sequence
  SiRNA target sequence
actggagtaaaactgttagga

SEQ ID NO: 298788 - DNA, 21 bp, Artificial sequence
  SiRNA target sequence
ctggagtaaaactgttaggaa

SEQ ID NO: 298789 - DNA, 21 bp, Artificial sequence
  SiRNA target sequence
tggagtaaaactgttaggaaa

SEQ ID NO: 298790 - DNA, 21 bp, Artificial sequence
  SiRNA target sequence
ggagtaaaactgttaggaaat

SEQ ID NO: 298791 - DNA, 21 bp, Artificial sequence
  SiRNA target sequence
gagtaaaactgttaggaaatt

SEQ ID NO: 298792 - DNA, 21 bp, Artificial sequence
  SiRNA target sequence
agtaaaactgttaggaaatta

SEQ ID NO: 298793 - DNA, 21 bp, Artificial sequence
  SiRNA target sequence
gtaaaactgttaggaaattaa

SEQ ID NO: 298794 - DNA, 21 bp, Artificial sequence
  SiRNA target sequence
taaaactgttaggaaattaac

SEQ ID NO: 298795 - DNA, 21 bp, Artificial sequence
  SiRNA target sequence
aaaactgttaggaaattaacc

SEQ ID NO: 298796 - DNA, 21 bp, Artificial sequence
  SiRNA target sequence
aaactgttaggaaattaacca

SEQ ID NO: 298797 - DNA, 21 bp, Artificial sequence
  SiRNA target sequence
aactgttaggaaattaaccaa

SEQ ID NO: 298798 - DNA, 21 bp, Artificial sequence
  SiRNA target sequence
actgttaggaaattaaccaaa

SEQ ID NO: 298799 - DNA, 21 bp, Artificial sequence
  SiRNA target sequence
ctgttaggaaattaaccaaat

SEQ ID NO: 298800 - DNA, 21 bp, Artificial sequence
  SiRNA target sequence
tgttaggaaattaaccaaatt

SEQ ID NO: 298801 - DNA, 21 bp, Artificial sequence
  SiRNA target sequence
gttaggaaattaaccaaattt

SEQ ID NO: 298802 - DNA, 21 bp, Artificial sequence
  SiRNA target sequence
ttaggaaattaaccaaatttg

SEQ ID NO: 298803 - DNA, 21 bp, Artificial sequence
  SiRNA target sequence
taggaaattaaccaaatttgg

SEQ ID NO: 298804 - DNA, 21 bp, Artificial sequence
  SiRNA target sequence
aggaaattaaccaaatttgga

SEQ ID NO: 298805 - DNA, 21 bp, Artificial sequence
  SiRNA target sequence
ggaaattaaccaaatttggaa

SEQ ID NO: 298806 - DNA, 21 bp, Artificial sequence
  SiRNA target sequence
gaaattaaccaaatttggaaa

SEQ ID NO: 298807 - DNA, 21 bp, Artificial sequence
  SiRNA target sequence
aaattaaccaaatttggaaat

SEQ ID NO: 298808 - DNA, 21 bp, Artificial sequence
  SiRNA target sequence
aattaaccaaatttggaaata

SEQ ID NO: 298809 - DNA, 21 bp, Artificial sequence
  SiRNA target sequence
attaaccaaatttggaaataa

SEQ ID NO: 298810 - DNA, 21 bp, Artificial sequence
  SiRNA target sequence
ttaaccaaatttggaaataaa

SEQ ID NO: 298811 - DNA, 21 bp, Artificial sequence
  SiRNA target sequence
taaccaaatttggaaataaag

SEQ ID NO: 298812 - DNA, 21 bp, Artificial sequence
  SiRNA target sequence
aaccaaatttggaaataaagt

SEQ ID NO: 298813 - DNA, 21 bp, Artificial sequence
  SiRNA target sequence
accaaatttggaaataaagta

SEQ ID NO: 298814 - DNA, 21 bp, Artificial sequence
  SiRNA target sequence
ccaaatttggaaataaagtaa

SEQ ID NO: 298815 - DNA, 21 bp, Artificial sequence
  SiRNA target sequence
caaatttggaaataaagtaat

SEQ ID NO: 298816 - DNA, 21 bp, Artificial sequence
  SiRNA target sequence
aaatttggaaataaagtaatt

SEQ ID NO: 298817 - DNA, 21 bp, Artificial sequence
  SiRNA target sequence
aatttggaaataaagtaattg

SEQ ID NO: 298818 - DNA, 21 bp, Artificial sequence
  SiRNA target sequence
atttggaaataaagtaattgc

SEQ ID NO: 298819 - DNA, 21 bp, Artificial sequence
  SiRNA target sequence
tttggaaataaagtaattgct

SEQ ID NO: 298820 - DNA, 21 bp, Artificial sequence
  SiRNA target sequence
ttggaaataaagtaattgctg

SEQ ID NO: 298821 - DNA, 21 bp, Artificial sequence
  SiRNA target sequence
tggaaataaagtaattgctgg

SEQ ID NO: 298822 - DNA, 21 bp, Artificial sequence
  SiRNA target sequence
ggaaataaagtaattgctggt

SEQ ID NO: 298823 - DNA, 21 bp, Artificial sequence
  SiRNA target sequence
gaaataaagtaattgctggtg

SEQ ID NO: 298824 - DNA, 21 bp, Artificial sequence
  SiRNA target sequence
aaataaagtaattgctggtga

SEQ ID NO: 298825 - DNA, 21 bp, Artificial sequence
  SiRNA target sequence
aataaagtaattgctggtgat

SEQ ID NO: 298826 - DNA, 21 bp, Artificial sequence
  SiRNA target sequence
ataaagtaattgctggtgatt

SEQ ID NO: 298827 - DNA, 21 bp, Artificial sequence
  SiRNA target sequence
taaagtaattgctggtgattt

SEQ ID NO: 298828 - DNA, 21 bp, Artificial sequence
  SiRNA target sequence
aaagtaattgctggtgatttt

SEQ ID NO: 298829 - DNA, 21 bp, Artificial sequence
  SiRNA target sequence
aagtaattgctggtgattttt

SEQ ID NO: 298830 - DNA, 21 bp, Artificial sequence
  SiRNA target sequence
agtaattgctggtgatttttc

SEQ ID NO: 298831 - DNA, 21 bp, Artificial sequence
  SiRNA target sequence
gtaattgctggtgatttttca

SEQ ID NO: 298832 - DNA, 21 bp, Artificial sequence
  SiRNA target sequence
taattgctggtgatttttcaa

SEQ ID NO: 298833 - DNA, 21 bp, Artificial sequence
  SiRNA target sequence
aattgctggtgatttttcaac

SEQ ID NO: 298834 - DNA, 21 bp, Artificial sequence
  SiRNA target sequence
attgctggtgatttttcaact

SEQ ID NO: 298835 - DNA, 21 bp, Artificial sequence
  SiRNA target sequence
ttgctggtgatttttcaactt

SEQ ID NO: 298836 - DNA, 21 bp, Artificial sequence
  SiRNA target sequence
tgctggtgatttttcaacttt

SEQ ID NO: 298837 - DNA, 21 bp, Artificial sequence
  SiRNA target sequence
gctggtgatttttcaactttt

SEQ ID NO: 298838 - DNA, 21 bp, Artificial sequence
  SiRNA target sequence
ctggtgatttttcaacttttg

SEQ ID NO: 298839 - DNA, 21 bp, Artificial sequence
  SiRNA target sequence
tggtgatttttcaacttttga

SEQ ID NO: 298840 - DNA, 21 bp, Artificial sequence
  SiRNA target sequence
ggtgatttttcaacttttgat

SEQ ID NO: 298841 - DNA, 21 bp, Artificial sequence
  SiRNA target sequence
gtgatttttcaacttttgatg

SEQ ID NO: 298842 - DNA, 21 bp, Artificial sequence
  SiRNA target sequence
tgatttttcaacttttgatgg

SEQ ID NO: 298843 - DNA, 21 bp, Artificial sequence
  SiRNA target sequence
gatttttcaacttttgatgga

SEQ ID NO: 298844 - DNA, 21 bp, Artificial sequence
  SiRNA target sequence
atttttcaacttttgatggat

SEQ ID NO: 298845 - DNA, 21 bp, Artificial sequence
  SiRNA target sequence
tttttcaacttttgatggatc

SEQ ID NO: 298846 - DNA, 21 bp, Artificial sequence
  SiRNA target sequence
ttttcaacttttgatggatca

SEQ ID NO: 298847 - DNA, 21 bp, Artificial sequence
  SiRNA target sequence
tttcaacttttgatggatcac

SEQ ID NO: 298848 - DNA, 21 bp, Artificial sequence
  SiRNA target sequence
ttcaacttttgatggatcact

SEQ ID NO: 298849 - DNA, 21 bp, Artificial sequence
  SiRNA target sequence
tcaacttttgatggatcacta

SEQ ID NO: 298850 - DNA, 21 bp, Artificial sequence
  SiRNA target sequence
caacttttgatggatcactaa

SEQ ID NO: 298851 - DNA, 21 bp, Artificial sequence
  SiRNA target sequence
aacttttgatggatcactaaa

SEQ ID NO: 298852 - DNA, 21 bp, Artificial sequence
  SiRNA target sequence
acttttgatggatcactaaac

SEQ ID NO: 298853 - DNA, 21 bp, Artificial sequence
  SiRNA target sequence
cttttgatggatcactaaacg

SEQ ID NO: 298854 - DNA, 21 bp, Artificial sequence
  SiRNA target sequence
ttttgatggatcactaaacgt

SEQ ID NO: 298855 - DNA, 21 bp, Artificial sequence
  SiRNA target sequence
tttgatggatcactaaacgtt

SEQ ID NO: 298856 - DNA, 21 bp, Artificial sequence
  SiRNA target sequence
ttgatggatcactaaacgttt

SEQ ID NO: 298857 - DNA, 21 bp, Artificial sequence
  SiRNA target sequence
tgatggatcactaaacgtttg

SEQ ID NO: 298858 - DNA, 21 bp, Artificial sequence
  SiRNA target sequence
gatggatcactaaacgtttgc

SEQ ID NO: 298859 - DNA, 21 bp, Artificial sequence
  SiRNA target sequence
atggatcactaaacgtttgca

SEQ ID NO: 298860 - DNA, 21 bp, Artificial sequence
  SiRNA target sequence
tggatcactaaacgtttgcat

SEQ ID NO: 298861 - DNA, 21 bp, Artificial sequence
  SiRNA target sequence
ggatcactaaacgtttgcatt

SEQ ID NO: 298862 - DNA, 21 bp, Artificial sequence
  SiRNA target sequence
gatcactaaacgtttgcatta

SEQ ID NO: 298863 - DNA, 21 bp, Artificial sequence
  SiRNA target sequence
atcactaaacgtttgcattat

SEQ ID NO: 298864 - DNA, 21 bp, Artificial sequence
  SiRNA target sequence
tcactaaacgtttgcattatg

SEQ ID NO: 298865 - DNA, 21 bp, Artificial sequence
  SiRNA target sequence
cactaaacgtttgcattatgg

SEQ ID NO: 298866 - DNA, 21 bp, Artificial sequence
  SiRNA target sequence
actaaacgtttgcattatgga

SEQ ID NO: 298867 - DNA, 21 bp, Artificial sequence
  SiRNA target sequence
ctaaacgtttgcattatggaa

SEQ ID NO: 298868 - DNA, 21 bp, Artificial sequence
  SiRNA target sequence
taaacgtttgcattatggaaa

SEQ ID NO: 298869 - DNA, 21 bp, Artificial sequence
  SiRNA target sequence
aaacgtttgcattatggaaaa

SEQ ID NO: 298870 - DNA, 21 bp, Artificial sequence
  SiRNA target sequence
aacgtttgcattatggaaaaa

SEQ ID NO: 298871 - DNA, 21 bp, Artificial sequence
  SiRNA target sequence
acgtttgcattatggaaaaat

SEQ ID NO: 298872 - DNA, 21 bp, Artificial sequence
  SiRNA target sequence
cgtttgcattatggaaaaatt

SEQ ID NO: 298873 - DNA, 21 bp, Artificial sequence
  SiRNA target sequence
gtttgcattatggaaaaattt

SEQ ID NO: 298874 - DNA, 21 bp, Artificial sequence
  SiRNA target sequence
tttgcattatggaaaaatttg

SEQ ID NO: 298875 - DNA, 21 bp, Artificial sequence
  SiRNA target sequence
ttgcattatggaaaaatttgc

SEQ ID NO: 298876 - DNA, 21 bp, Artificial sequence
  SiRNA target sequence
tgcattatggaaaaatttgca

SEQ ID NO: 298877 - DNA, 21 bp, Artificial sequence
  SiRNA target sequence
gcattatggaaaaatttgcag

SEQ ID NO: 298878 - DNA, 21 bp, Artificial sequence
  SiRNA target sequence
cattatggaaaaatttgcaga

SEQ ID NO: 298879 - DNA, 21 bp, Artificial sequence
  SiRNA target sequence
attatggaaaaatttgcagat

SEQ ID NO: 298880 - DNA, 21 bp, Artificial sequence
  SiRNA target sequence
ttatggaaaaatttgcagatt

SEQ ID NO: 298881 - DNA, 21 bp, Artificial sequence
  SiRNA target sequence
tatggaaaaatttgcagattt

SEQ ID NO: 298882 - DNA, 21 bp, Artificial sequence
  SiRNA target sequence
atggaaaaatttgcagattta

SEQ ID NO: 298883 - DNA, 21 bp, Artificial sequence
  SiRNA target sequence
tggaaaaatttgcagatttag

SEQ ID NO: 298884 - DNA, 21 bp, Artificial sequence
  SiRNA target sequence
ggaaaaatttgcagatttagc

SEQ ID NO: 298885 - DNA, 21 bp, Artificial sequence
  SiRNA target sequence
gaaaaatttgcagatttagct

SEQ ID NO: 298886 - DNA, 21 bp, Artificial sequence
  SiRNA target sequence
aaaaatttgcagatttagcta

SEQ ID NO: 298887 - DNA, 21 bp, Artificial sequence
  SiRNA target sequence
aaaatttgcagatttagctaa

SEQ ID NO: 298888 - DNA, 21 bp, Artificial sequence
  SiRNA target sequence
aaatttgcagatttagctaat

SEQ ID NO: 298889 - DNA, 21 bp, Artificial sequence
  SiRNA target sequence
aatttgcagatttagctaatg

SEQ ID NO: 298890 - DNA, 21 bp, Artificial sequence
  SiRNA target sequence
atttgcagatttagctaatga

SEQ ID NO: 298891 - DNA, 21 bp, Artificial sequence
  SiRNA target sequence
tttgcagatttagctaatgag

SEQ ID NO: 298892 - DNA, 21 bp, Artificial sequence
  SiRNA target sequence
ttgcagatttagctaatgagt

SEQ ID NO: 298893 - DNA, 21 bp, Artificial sequence
  SiRNA target sequence
tgcagatttagctaatgagtt

SEQ ID NO: 298894 - DNA, 21 bp, Artificial sequence
  SiRNA target sequence
gcagatttagctaatgagttt

SEQ ID NO: 298895 - DNA, 21 bp, Artificial sequence
  SiRNA target sequence
cagatttagctaatgagtttt

SEQ ID NO: 298896 - DNA, 21 bp, Artificial sequence
  SiRNA target sequence
agatttagctaatgagtttta

SEQ ID NO: 298897 - DNA, 21 bp, Artificial sequence
  SiRNA target sequence
gatttagctaatgagttttac

SEQ ID NO: 298898 - DNA, 21 bp, Artificial sequence
  SiRNA target sequence
atttagctaatgagttttacg

SEQ ID NO: 298899 - DNA, 21 bp, Artificial sequence
  SiRNA target sequence
tttagctaatgagttttacga

SEQ ID NO: 298900 - DNA, 21 bp, Artificial sequence
  SiRNA target sequence
ttagctaatgagttttacgat

SEQ ID NO: 298901 - DNA, 21 bp, Artificial sequence
  SiRNA target sequence
tagctaatgagttttacgatg

SEQ ID NO: 298902 - DNA, 21 bp, Artificial sequence
  SiRNA target sequence
agctaatgagttttacgatga

SEQ ID NO: 298903 - DNA, 21 bp, Artificial sequence
  SiRNA target sequence
gctaatgagttttacgatgat

SEQ ID NO: 298904 - DNA, 21 bp, Artificial sequence
  SiRNA target sequence
ctaatgagttttacgatgatg

SEQ ID NO: 298905 - DNA, 21 bp, Artificial sequence
  SiRNA target sequence
taatgagttttacgatgatgg

SEQ ID NO: 298906 - DNA, 21 bp, Artificial sequence
  SiRNA target sequence
aatgagttttacgatgatgga

SEQ ID NO: 298907 - DNA, 21 bp, Artificial sequence
  SiRNA target sequence
atgagttttacgatgatggac

SEQ ID NO: 298908 - DNA, 21 bp, Artificial sequence
  SiRNA target sequence
tgagttttacgatgatggacc

SEQ ID NO: 298909 - DNA, 21 bp, Artificial sequence
  SiRNA target sequence
gagttttacgatgatggacca

SEQ ID NO: 298910 - DNA, 21 bp, Artificial sequence
  SiRNA target sequence
agttttacgatgatggaccag

SEQ ID NO: 298911 - DNA, 21 bp, Artificial sequence
  SiRNA target sequence
gttttacgatgatggaccaga

SEQ ID NO: 298912 - DNA, 21 bp, Artificial sequence
  SiRNA target sequence
ttttacgatgatggaccagaa

SEQ ID NO: 298913 - DNA, 21 bp, Artificial sequence
  SiRNA target sequence
tttacgatgatggaccagaaa

SEQ ID NO: 298914 - DNA, 21 bp, Artificial sequence
  SiRNA target sequence
ttacgatgatggaccagaaaa

SEQ ID NO: 298915 - DNA, 21 bp, Artificial sequence
  SiRNA target sequence
tacgatgatggaccagaaaat

SEQ ID NO: 298916 - DNA, 21 bp, Artificial sequence
  SiRNA target sequence
acgatgatggaccagaaaatg

SEQ ID NO: 298917 - DNA, 21 bp, Artificial sequence
  SiRNA target sequence
cgatgatggaccagaaaatgc

SEQ ID NO: 298918 - DNA, 21 bp, Artificial sequence
  SiRNA target sequence
gatgatggaccagaaaatgct

SEQ ID NO: 298919 - DNA, 21 bp, Artificial sequence
  SiRNA target sequence
atgatggaccagaaaatgctt

SEQ ID NO: 298920 - DNA, 21 bp, Artificial sequence
  SiRNA target sequence
tgatggaccagaaaatgcttt

SEQ ID NO: 298921 - DNA, 21 bp, Artificial sequence
  SiRNA target sequence
gatggaccagaaaatgctttg

SEQ ID NO: 298922 - DNA, 21 bp, Artificial sequence
  SiRNA target sequence
atggaccagaaaatgctttga

SEQ ID NO: 298923 - DNA, 21 bp, Artificial sequence
  SiRNA target sequence
tggaccagaaaatgctttgat

SEQ ID NO: 298924 - DNA, 21 bp, Artificial sequence
  SiRNA target sequence
ggaccagaaaatgctttgatc

SEQ ID NO: 298925 - DNA, 21 bp, Artificial sequence
  SiRNA target sequence
gaccagaaaatgctttgatcc

SEQ ID NO: 298926 - DNA, 21 bp, Artificial sequence
  SiRNA target sequence
accagaaaatgctttgatccg

SEQ ID NO: 298927 - DNA, 21 bp, Artificial sequence
  SiRNA target sequence
ccagaaaatgctttgatccgt

SEQ ID NO: 298928 - DNA, 21 bp, Artificial sequence
  SiRNA target sequence
cagaaaatgctttgatccgtc

SEQ ID NO: 298929 - DNA, 21 bp, Artificial sequence
  SiRNA target sequence
agaaaatgctttgatccgtca

SEQ ID NO: 298930 - DNA, 21 bp, Artificial sequence
  SiRNA target sequence
gaaaatgctttgatccgtcat

SEQ ID NO: 298931 - DNA, 21 bp, Artificial sequence
  SiRNA target sequence
aaaatgctttgatccgtcatg

SEQ ID NO: 298932 - DNA, 21 bp, Artificial sequence
  SiRNA target sequence
aaatgctttgatccgtcatgt

SEQ ID NO: 298933 - DNA, 21 bp, Artificial sequence
  SiRNA target sequence
aatgctttgatccgtcatgta

SEQ ID NO: 298934 - DNA, 21 bp, Artificial sequence
  SiRNA target sequence
atgctttgatccgtcatgtat

SEQ ID NO: 298935 - DNA, 21 bp, Artificial sequence
  SiRNA target sequence
tgctttgatccgtcatgtatt

SEQ ID NO: 298936 - DNA, 21 bp, Artificial sequence
  SiRNA target sequence
gctttgatccgtcatgtatta

SEQ ID NO: 298937 - DNA, 21 bp, Artificial sequence
  SiRNA target sequence
ctttgatccgtcatgtattat

SEQ ID NO: 298938 - DNA, 21 bp, Artificial sequence
  SiRNA target sequence
tttgatccgtcatgtattatt

SEQ ID NO: 298939 - DNA, 21 bp, Artificial sequence
  SiRNA target sequence
ttgatccgtcatgtattattg

SEQ ID NO: 298940 - DNA, 21 bp, Artificial sequence
  SiRNA target sequence
tgatccgtcatgtattattgg

SEQ ID NO: 298941 - DNA, 21 bp, Artificial sequence
  SiRNA target sequence
gatccgtcatgtattattggt

SEQ ID NO: 298942 - DNA, 21 bp, Artificial sequence
  SiRNA target sequence
atccgtcatgtattattggtg

SEQ ID NO: 298943 - DNA, 21 bp, Artificial sequence
  SiRNA target sequence
tccgtcatgtattattggtgg

SEQ ID NO: 298944 - DNA, 21 bp, Artificial sequence
  SiRNA target sequence
ccgtcatgtattattggtgga

SEQ ID NO: 298945 - DNA, 21 bp, Artificial sequence
  SiRNA target sequence
cgtcatgtattattggtggat

SEQ ID NO: 298946 - DNA, 21 bp, Artificial sequence
  SiRNA target sequence
gtcatgtattattggtggatg

SEQ ID NO: 298947 - DNA, 21 bp, Artificial sequence
  SiRNA target sequence
tcatgtattattggtggatgt

SEQ ID NO: 298948 - DNA, 21 bp, Artificial sequence
  SiRNA target sequence
catgtattattggtggatgtg

SEQ ID NO: 298949 - DNA, 21 bp, Artificial sequence
  SiRNA target sequence
atgtattattggtggatgtgt

SEQ ID NO: 298950 - DNA, 21 bp, Artificial sequence
  SiRNA target sequence
tgtattattggtggatgtgta

SEQ ID NO: 298951 - DNA, 21 bp, Artificial sequence
  SiRNA target sequence
gtattattggtggatgtgtac

SEQ ID NO: 298952 - DNA, 21 bp, Artificial sequence
  SiRNA target sequence
tattattggtggatgtgtaca

SEQ ID NO: 298953 - DNA, 21 bp, Artificial sequence
  SiRNA target sequence
attattggtggatgtgtacaa

SEQ ID NO: 298954 - DNA, 21 bp, Artificial sequence
  SiRNA target sequence
ttattggtggatgtgtacaat

SEQ ID NO: 298955 - DNA, 21 bp, Artificial sequence
  SiRNA target sequence
tattggtggatgtgtacaatt

SEQ ID NO: 298956 - DNA, 21 bp, Artificial sequence
  SiRNA target sequence
attggtggatgtgtacaattc

SEQ ID NO: 298957 - DNA, 21 bp, Artificial sequence
  SiRNA target sequence
ttggtggatgtgtacaattct

SEQ ID NO: 298958 - DNA, 21 bp, Artificial sequence
  SiRNA target sequence
tggtggatgtgtacaattctg

SEQ ID NO: 298959 - DNA, 21 bp, Artificial sequence
  SiRNA target sequence
ggtggatgtgtacaattctgt

SEQ ID NO: 298960 - DNA, 21 bp, Artificial sequence
  SiRNA target sequence
gtggatgtgtacaattctgtg

SEQ ID NO: 298961 - DNA, 21 bp, Artificial sequence
  SiRNA target sequence
tggatgtgtacaattctgtgc

SEQ ID NO: 298962 - DNA, 21 bp, Artificial sequence
  SiRNA target sequence
ggatgtgtacaattctgtgca

SEQ ID NO: 298963 - DNA, 21 bp, Artificial sequence
  SiRNA target sequence
gatgtgtacaattctgtgcat

SEQ ID NO: 298964 - DNA, 21 bp, Artificial sequence
  SiRNA target sequence
atgtgtacaattctgtgcata

SEQ ID NO: 298965 - DNA, 21 bp, Artificial sequence
  SiRNA target sequence
tgtgtacaattctgtgcatat

SEQ ID NO: 298966 - DNA, 21 bp, Artificial sequence
  SiRNA target sequence
gtgtacaattctgtgcatatt

SEQ ID NO: 298967 - DNA, 21 bp, Artificial sequence
  SiRNA target sequence
tgtacaattctgtgcatattt

SEQ ID NO: 298968 - DNA, 21 bp, Artificial sequence
  SiRNA target sequence
gtacaattctgtgcatatttg

SEQ ID NO: 298969 - DNA, 21 bp, Artificial sequence
  SiRNA target sequence
tacaattctgtgcatatttgt

SEQ ID NO: 298970 - DNA, 21 bp, Artificial sequence
  SiRNA target sequence
acaattctgtgcatatttgta

SEQ ID NO: 298971 - DNA, 21 bp, Artificial sequence
  SiRNA target sequence
caattctgtgcatatttgtaa

SEQ ID NO: 298972 - DNA, 21 bp, Artificial sequence
  SiRNA target sequence
aattctgtgcatatttgtaat

SEQ ID NO: 298973 - DNA, 21 bp, Artificial sequence
  SiRNA target sequence
attctgtgcatatttgtaatg

SEQ ID NO: 298974 - DNA, 21 bp, Artificial sequence
  SiRNA target sequence
ttctgtgcatatttgtaatga

SEQ ID NO: 298975 - DNA, 21 bp, Artificial sequence
  SiRNA target sequence
tctgtgcatatttgtaatgac

SEQ ID NO: 298976 - DNA, 21 bp, Artificial sequence
  SiRNA target sequence
ctgtgcatatttgtaatgact

SEQ ID NO: 298977 - DNA, 21 bp, Artificial sequence
  SiRNA target sequence
tgtgcatatttgtaatgactc

SEQ ID NO: 298978 - DNA, 21 bp, Artificial sequence
  SiRNA target sequence
gtgcatatttgtaatgactca

SEQ ID NO: 298979 - DNA, 21 bp, Artificial sequence
  SiRNA target sequence
tgcatatttgtaatgactcag

SEQ ID NO: 298980 - DNA, 21 bp, Artificial sequence
  SiRNA target sequence
gcatatttgtaatgactcagt

SEQ ID NO: 298981 - DNA, 21 bp, Artificial sequence
  SiRNA target sequence
catatttgtaatgactcagta

SEQ ID NO: 298982 - DNA, 21 bp, Artificial sequence
  SiRNA target sequence
atatttgtaatgactcagtat

SEQ ID NO: 298983 - DNA, 21 bp, Artificial sequence
  SiRNA target sequence
tatttgtaatgactcagtata

SEQ ID NO: 298984 - DNA, 21 bp, Artificial sequence
  SiRNA target sequence
atttgtaatgactcagtatac

SEQ ID NO: 298985 - DNA, 21 bp, Artificial sequence
  SiRNA target sequence
tttgtaatgactcagtataca

SEQ ID NO: 298986 - DNA, 21 bp, Artificial sequence
  SiRNA target sequence
ttgtaatgactcagtatacat

SEQ ID NO: 298987 - DNA, 21 bp, Artificial sequence
  SiRNA target sequence
tgtaatgactcagtatacatg

SEQ ID NO: 298988 - DNA, 21 bp, Artificial sequence
  SiRNA target sequence
gtaatgactcagtatacatga

SEQ ID NO: 298989 - DNA, 21 bp, Artificial sequence
  SiRNA target sequence
taatgactcagtatacatgat

SEQ ID NO: 298990 - DNA, 21 bp, Artificial sequence
  SiRNA target sequence
aatgactcagtatacatgatg

SEQ ID NO: 298991 - DNA, 21 bp, Artificial sequence
  SiRNA target sequence
atgactcagtatacatgatga

SEQ ID NO: 298992 - DNA, 21 bp, Artificial sequence
  SiRNA target sequence
tgactcagtatacatgatgac

SEQ ID NO: 298993 - DNA, 21 bp, Artificial sequence
  SiRNA target sequence
gactcagtatacatgatgact

SEQ ID NO: 298994 - DNA, 21 bp, Artificial sequence
  SiRNA target sequence
actcagtatacatgatgactc

SEQ ID NO: 298995 - DNA, 21 bp, Artificial sequence
  SiRNA target sequence
ctcagtatacatgatgactca

SEQ ID NO: 298996 - DNA, 21 bp, Artificial sequence
  SiRNA target sequence
tcagtatacatgatgactcat

SEQ ID NO: 298997 - DNA, 21 bp, Artificial sequence
  SiRNA target sequence
cagtatacatgatgactcata

SEQ ID NO: 298998 - DNA, 21 bp, Artificial sequence
  SiRNA target sequence
agtatacatgatgactcatag

SEQ ID NO: 298999 - DNA, 21 bp, Artificial sequence
  SiRNA target sequence
gtatacatgatgactcatagc

SEQ ID NO: 299000 - DNA, 21 bp, Artificial sequence
  SiRNA target sequence
tatacatgatgactcatagcc

SEQ ID NO: 299001 - DNA, 21 bp, Artificial sequence
  SiRNA target sequence
atacatgatgactcatagcca

SEQ ID NO: 299002 - DNA, 21 bp, Artificial sequence
  SiRNA target sequence
tacatgatgactcatagccaa

SEQ ID NO: 299003 - DNA, 21 bp, Artificial sequence
  SiRNA target sequence
acatgatgactcatagccaac

SEQ ID NO: 299004 - DNA, 21 bp, Artificial sequence
  SiRNA target sequence
catgatgactcatagccaacc

SEQ ID NO: 299005 - DNA, 21 bp, Artificial sequence
  SiRNA target sequence
atgatgactcatagccaaccc

SEQ ID NO: 299006 - DNA, 21 bp, Artificial sequence
  SiRNA target sequence
tgatgactcatagccaaccca

SEQ ID NO: 299007 - DNA, 21 bp, Artificial sequence
  SiRNA target sequence
gatgactcatagccaacccac

SEQ ID NO: 299008 - DNA, 21 bp, Artificial sequence
  SiRNA target sequence
atgactcatagccaacccaca

SEQ ID NO: 299009 - DNA, 21 bp, Artificial sequence
  SiRNA target sequence
tacgtacaattttgacgcttc

SEQ ID NO: 299010 - DNA, 21 bp, Artificial sequence
  SiRNA target sequence
acgtacaattttgacgcttcg

SEQ ID NO: 299011 - DNA, 21 bp, Artificial sequence
  SiRNA target sequence
cgtacaattttgacgcttcgt

SEQ ID NO: 299012 - DNA, 21 bp, Artificial sequence
  SiRNA target sequence
gtacaattttgacgcttcgtt

SEQ ID NO: 299013 - DNA, 21 bp, Artificial sequence
  SiRNA target sequence
tacaattttgacgcttcgttc

SEQ ID NO: 299014 - DNA, 21 bp, Artificial sequence
  SiRNA target sequence
acaattttgacgcttcgttca

SEQ ID NO: 299015 - DNA, 21 bp, Artificial sequence
  SiRNA target sequence
caattttgacgcttcgttcat

SEQ ID NO: 299016 - DNA, 21 bp, Artificial sequence
  SiRNA target sequence
aattttgacgcttcgttcatg

SEQ ID NO: 299017 - DNA, 21 bp, Artificial sequence
  SiRNA target sequence
attttgacgcttcgttcatgc

SEQ ID NO: 299018 - DNA, 21 bp, Artificial sequence
  SiRNA target sequence
ttttgacgcttcgttcatgca

SEQ ID NO: 299019 - DNA, 21 bp, Artificial sequence
  SiRNA target sequence
tttgacgcttcgttcatgcaa

SEQ ID NO: 299020 - DNA, 21 bp, Artificial sequence
  SiRNA target sequence
ttgacgcttcgttcatgcaac

SEQ ID NO: 299021 - DNA, 21 bp, Artificial sequence
  SiRNA target sequence
tgacgcttcgttcatgcaaca

SEQ ID NO: 299022 - DNA, 21 bp, Artificial sequence
  SiRNA target sequence
gacgcttcgttcatgcaacaa

SEQ ID NO: 299023 - DNA, 21 bp, Artificial sequence
  SiRNA target sequence
acgcttcgttcatgcaacaat

SEQ ID NO: 299024 - DNA, 21 bp, Artificial sequence
  SiRNA target sequence
cgcttcgttcatgcaacaatg

SEQ ID NO: 299025 - DNA, 21 bp, Artificial sequence
  SiRNA target sequence
gcttcgttcatgcaacaatga

SEQ ID NO: 299026 - DNA, 21 bp, Artificial sequence
  SiRNA target sequence
cttcgttcatgcaacaatgaa

SEQ ID NO: 299027 - DNA, 21 bp, Artificial sequence
  SiRNA target sequence
ttcgttcatgcaacaatgaac

SEQ ID NO: 299028 - DNA, 21 bp, Artificial sequence
  SiRNA target sequence
tcgttcatgcaacaatgaact

SEQ ID NO: 299029 - DNA, 21 bp, Artificial sequence
  SiRNA target sequence
cgttcatgcaacaatgaactc

SEQ ID NO: 299030 - DNA, 21 bp, Artificial sequence
  SiRNA target sequence
gttcatgcaacaatgaactca

SEQ ID NO: 299031 - DNA, 21 bp, Artificial sequence
  SiRNA target sequence
ttcatgcaacaatgaactcac

SEQ ID NO: 299032 - DNA, 21 bp, Artificial sequence
  SiRNA target sequence
tcatgcaacaatgaactcaca

SEQ ID NO: 299033 - DNA, 21 bp, Artificial sequence
  SiRNA target sequence
catgcaacaatgaactcacat

SEQ ID NO: 299034 - DNA, 21 bp, Artificial sequence
  SiRNA target sequence
atgcaacaatgaactcacatg

SEQ ID NO: 299035 - DNA, 21 bp, Artificial sequence
  SiRNA target sequence
tgcaacaatgaactcacatgt

SEQ ID NO: 299036 - DNA, 21 bp, Artificial sequence
  SiRNA target sequence
gcaacaatgaactcacatgtg

SEQ ID NO: 299037 - DNA, 21 bp, Artificial sequence
  SiRNA target sequence
caacaatgaactcacatgtgg

SEQ ID NO: 299038 - DNA, 21 bp, Artificial sequence
  SiRNA target sequence
aacaatgaactcacatgtggc

SEQ ID NO: 299039 - DNA, 21 bp, Artificial sequence
  SiRNA target sequence
acaatgaactcacatgtggcg

SEQ ID NO: 299040 - DNA, 21 bp, Artificial sequence
  SiRNA target sequence
caatgaactcacatgtggcgc

SEQ ID NO: 299041 - DNA, 21 bp, Artificial sequence
  SiRNA target sequence
aatgaactcacatgtggcgct

SEQ ID NO: 299042 - DNA, 21 bp, Artificial sequence
  SiRNA target sequence
atgaactcacatgtggcgctc

SEQ ID NO: 299043 - DNA, 21 bp, Artificial sequence
  SiRNA target sequence
tgaactcacatgtggcgctcg

SEQ ID NO: 299044 - DNA, 21 bp, Artificial sequence
  SiRNA target sequence
gaactcacatgtggcgctcgg

SEQ ID NO: 299045 - DNA, 21 bp, Artificial sequence
  SiRNA target sequence
aactcacatgtggcgctcggt

SEQ ID NO: 299046 - DNA, 21 bp, Artificial sequence
  SiRNA target sequence
actcacatgtggcgctcggta

SEQ ID NO: 299047 - DNA, 21 bp, Artificial sequence
  SiRNA target sequence
ctcacatgtggcgctcggtag

SEQ ID NO: 299048 - DNA, 21 bp, Artificial sequence
  SiRNA target sequence
tcacatgtggcgctcggtagt

SEQ ID NO: 299049 - DNA, 21 bp, Artificial sequence
  SiRNA target sequence
cacatgtggcgctcggtagta

SEQ ID NO: 299050 - DNA, 21 bp, Artificial sequence
  SiRNA target sequence
acatgtggcgctcggtagtaa

SEQ ID NO: 299051 - DNA, 21 bp, Artificial sequence
  SiRNA target sequence
catgtggcgctcggtagtaac

SEQ ID NO: 299052 - DNA, 21 bp, Artificial sequence
  SiRNA target sequence
atgtggcgctcggtagtaacc

SEQ ID NO: 299053 - DNA, 21 bp, Artificial sequence
  SiRNA target sequence
tgtggcgctcggtagtaacca

SEQ ID NO: 299054 - DNA, 21 bp, Artificial sequence
  SiRNA target sequence
gtggcgctcggtagtaaccag

SEQ ID NO: 299055 - DNA, 21 bp, Artificial sequence
  SiRNA target sequence
tggcgctcggtagtaaccaga

SEQ ID NO: 299056 - DNA, 21 bp, Artificial sequence
  SiRNA target sequence
ggcgctcggtagtaaccagag

SEQ ID NO: 299057 - DNA, 21 bp, Artificial sequence
  SiRNA target sequence
gcgctcggtagtaaccagagg

SEQ ID NO: 299058 - DNA, 21 bp, Artificial sequence
  SiRNA target sequence
cgctcggtagtaaccagaggg

SEQ ID NO: 299059 - DNA, 21 bp, Artificial sequence
  SiRNA target sequence
gctcggtagtaaccagagggg

SEQ ID NO: 299060 - DNA, 21 bp, Artificial sequence
  SiRNA target sequence
ctcggtagtaaccagaggggc

SEQ ID NO: 299061 - DNA, 21 bp, Artificial sequence
  SiRNA target sequence
tcggtagtaaccagaggggcg

SEQ ID NO: 299062 - DNA, 21 bp, Artificial sequence
  SiRNA target sequence
cggtagtaaccagaggggcgt

SEQ ID NO: 299063 - DNA, 21 bp, Artificial sequence
  SiRNA target sequence
ggtagtaaccagaggggcgtc

SEQ ID NO: 299064 - DNA, 21 bp, Artificial sequence
  SiRNA target sequence
gtagtaaccagaggggcgtca

SEQ ID NO: 299065 - DNA, 21 bp, Artificial sequence
  SiRNA target sequence
tagtaaccagaggggcgtcat

SEQ ID NO: 299066 - DNA, 21 bp, Artificial sequence
  SiRNA target sequence
agtaaccagaggggcgtcatt

SEQ ID NO: 299067 - DNA, 21 bp, Artificial sequence
  SiRNA target sequence
gtaaccagaggggcgtcattc

SEQ ID NO: 299068 - DNA, 21 bp, Artificial sequence
  SiRNA target sequence
taaccagaggggcgtcattcc

SEQ ID NO: 299069 - DNA, 21 bp, Artificial sequence
  SiRNA target sequence
aaccagaggggcgtcattccc

SEQ ID NO: 299070 - DNA, 21 bp, Artificial sequence
  SiRNA target sequence
accagaggggcgtcattcccc

SEQ ID NO: 299071 - DNA, 21 bp, Artificial sequence
  SiRNA target sequence
ccagaggggcgtcattccccc

SEQ ID NO: 299072 - DNA, 21 bp, Artificial sequence
  SiRNA target sequence
cagaggggcgtcattcccccg

SEQ ID NO: 299073 - DNA, 21 bp, Artificial sequence
  SiRNA target sequence
agaggggcgtcattcccccgt

SEQ ID NO: 299074 - DNA, 21 bp, Artificial sequence
  SiRNA target sequence
gaggggcgtcattcccccgta

SEQ ID NO: 299075 - DNA, 21 bp, Artificial sequence
  SiRNA target sequence
aggggcgtcattcccccgtat

SEQ ID NO: 299076 - DNA, 21 bp, Artificial sequence
  SiRNA target sequence
ggggcgtcattcccccgtatg

SEQ ID NO: 299077 - DNA, 21 bp, Artificial sequence
  SiRNA target sequence
gggcgtcattcccccgtatgg

SEQ ID NO: 299078 - DNA, 21 bp, Artificial sequence
  SiRNA target sequence
ggcgtcattcccccgtatgga

SEQ ID NO: 299079 - DNA, 21 bp, Artificial sequence
  SiRNA target sequence
gcgtcattcccccgtatggag

SEQ ID NO: 299080 - DNA, 21 bp, Artificial sequence
  SiRNA target sequence
cgtcattcccccgtatggagt

SEQ ID NO: 299081 - DNA, 21 bp, Artificial sequence
  SiRNA target sequence
gtcattcccccgtatggagtg

SEQ ID NO: 299082 - DNA, 21 bp, Artificial sequence
  SiRNA target sequence
tcattcccccgtatggagtgg

SEQ ID NO: 299083 - DNA, 21 bp, Artificial sequence
  SiRNA target sequence
cattcccccgtatggagtgga

SEQ ID NO: 299084 - DNA, 21 bp, Artificial sequence
  SiRNA target sequence
attcccccgtatggagtggag

SEQ ID NO: 299085 - DNA, 21 bp, Artificial sequence
  SiRNA target sequence
ttcccccgtatggagtggaga

SEQ ID NO: 299086 - DNA, 21 bp, Artificial sequence
  SiRNA target sequence
tcccccgtatggagtggagaa

SEQ ID NO: 299087 - DNA, 21 bp, Artificial sequence
  SiRNA target sequence
cccccgtatggagtggagaat

SEQ ID NO: 299088 - DNA, 21 bp, Artificial sequence
  SiRNA target sequence
ccccgtatggagtggagaata

SEQ ID NO: 299089 - DNA, 21 bp, Artificial sequence
  SiRNA target sequence
cccgtatggagtggagaatat

SEQ ID NO: 299090 - DNA, 21 bp, Artificial sequence
  SiRNA target sequence
ccgtatggagtggagaatata

SEQ ID NO: 299091 - DNA, 21 bp, Artificial sequence
  SiRNA target sequence
cgtatggagtggagaatataa

SEQ ID NO: 299092 - DNA, 21 bp, Artificial sequence
  SiRNA target sequence
gtatggagtggagaatataag

SEQ ID NO: 299093 - DNA, 21 bp, Artificial sequence
  SiRNA target sequence
tatggagtggagaatataagc

SEQ ID NO: 299094 - DNA, 21 bp, Artificial sequence
  SiRNA target sequence
atggagtggagaatataagct

SEQ ID NO: 299095 - DNA, 21 bp, Artificial sequence
  SiRNA target sequence
tggagtggagaatataagcta

SEQ ID NO: 299096 - DNA, 21 bp, Artificial sequence
  SiRNA target sequence
ggagtggagaatataagctac

SEQ ID NO: 299097 - DNA, 21 bp, Artificial sequence
  SiRNA target sequence
gagtggagaatataagctacc

SEQ ID NO: 299098 - DNA, 21 bp, Artificial sequence
  SiRNA target sequence
agtggagaatataagctaccg

SEQ ID NO: 299099 - DNA, 21 bp, Artificial sequence
  SiRNA target sequence
gtggagaatataagctaccga

SEQ ID NO: 299100 - DNA, 21 bp, Artificial sequence
  SiRNA target sequence
tggagaatataagctaccgac

SEQ ID NO: 299101 - DNA, 21 bp, Artificial sequence
  SiRNA target sequence
ggagaatataagctaccgact

SEQ ID NO: 299102 - DNA, 21 bp, Artificial sequence
  SiRNA target sequence
gagaatataagctaccgactc

SEQ ID NO: 299103 - DNA, 21 bp, Artificial sequence
  SiRNA target sequence
agaatataagctaccgactcg

SEQ ID NO: 299104 - DNA, 21 bp, Artificial sequence
  SiRNA target sequence
gaatataagctaccgactcga

SEQ ID NO: 299105 - DNA, 21 bp, Artificial sequence
  SiRNA target sequence
aatataagctaccgactcgag

SEQ ID NO: 299106 - DNA, 21 bp, Artificial sequence
  SiRNA target sequence
atataagctaccgactcgagc

SEQ ID NO: 299107 - DNA, 21 bp, Artificial sequence
  SiRNA target sequence
tataagctaccgactcgagct

SEQ ID NO: 299108 - DNA, 21 bp, Artificial sequence
  SiRNA target sequence
ataagctaccgactcgagctg

SEQ ID NO: 299109 - DNA, 21 bp, Artificial sequence
  SiRNA target sequence
taagctaccgactcgagctgt

SEQ ID NO: 299110 - DNA, 21 bp, Artificial sequence
  SiRNA target sequence
aagctaccgactcgagctgta

SEQ ID NO: 299111 - DNA, 21 bp, Artificial sequence
  SiRNA target sequence
agctaccgactcgagctgtag

SEQ ID NO: 299112 - DNA, 21 bp, Artificial sequence
  SiRNA target sequence
gctaccgactcgagctgtaga

SEQ ID NO: 299113 - DNA, 21 bp, Artificial sequence
  SiRNA target sequence
ctaccgactcgagctgtagaa

SEQ ID NO: 299114 - DNA, 21 bp, Artificial sequence
  SiRNA target sequence
taccgactcgagctgtagaat

SEQ ID NO: 299115 - DNA, 21 bp, Artificial sequence
  SiRNA target sequence
accgactcgagctgtagaata

SEQ ID NO: 299116 - DNA, 21 bp, Artificial sequence
  SiRNA target sequence
ccgactcgagctgtagaataa

SEQ ID NO: 299117 - DNA, 21 bp, Artificial sequence
  SiRNA target sequence
cgactcgagctgtagaataat

SEQ ID NO: 299118 - DNA, 21 bp, Artificial sequence
  SiRNA target sequence
gactcgagctgtagaataatt

SEQ ID NO: 299119 - DNA, 21 bp, Artificial sequence
  SiRNA target sequence
actcgagctgtagaataattc

SEQ ID NO: 299120 - DNA, 21 bp, Artificial sequence
  SiRNA target sequence
ctcgagctgtagaataattca

SEQ ID NO: 299121 - DNA, 21 bp, Artificial sequence
  SiRNA target sequence
tcgagctgtagaataattcag

SEQ ID NO: 299122 - DNA, 21 bp, Artificial sequence
  SiRNA target sequence
cgagctgtagaataattcagc

SEQ ID NO: 299123 - DNA, 21 bp, Artificial sequence
  SiRNA target sequence
gagctgtagaataattcagca

SEQ ID NO: 299124 - DNA, 21 bp, Artificial sequence
  SiRNA target sequence
agctgtagaataattcagcaa

SEQ ID NO: 299125 - DNA, 21 bp, Artificial sequence
  SiRNA target sequence
gctgtagaataattcagcaac

SEQ ID NO: 299126 - DNA, 21 bp, Artificial sequence
  SiRNA target sequence
ctgtagaataattcagcaact

SEQ ID NO: 299127 - DNA, 21 bp, Artificial sequence
  SiRNA target sequence
tgtagaataattcagcaactt

SEQ ID NO: 299128 - DNA, 21 bp, Artificial sequence
  SiRNA target sequence
gtagaataattcagcaactta

SEQ ID NO: 299129 - DNA, 21 bp, Artificial sequence
  SiRNA target sequence
tagaataattcagcaacttat

SEQ ID NO: 299130 - DNA, 21 bp, Artificial sequence
  SiRNA target sequence
agaataattcagcaacttata

SEQ ID NO: 299131 - DNA, 21 bp, Artificial sequence
  SiRNA target sequence
gaataattcagcaacttataa

SEQ ID NO: 299132 - DNA, 21 bp, Artificial sequence
  SiRNA target sequence
aataattcagcaacttataac

SEQ ID NO: 299133 - DNA, 21 bp, Artificial sequence
  SiRNA target sequence
ataattcagcaacttataacg

SEQ ID NO: 299134 - DNA, 21 bp, Artificial sequence
  SiRNA target sequence
taattcagcaacttataacga

SEQ ID NO: 299135 - DNA, 21 bp, Artificial sequence
  SiRNA target sequence
aattcagcaacttataacgaa

SEQ ID NO: 299136 - DNA, 21 bp, Artificial sequence
  SiRNA target sequence
attcagcaacttataacgaac

SEQ ID NO: 299137 - DNA, 21 bp, Artificial sequence
  SiRNA target sequence
ttcagcaacttataacgaaca

SEQ ID NO: 299138 - DNA, 21 bp, Artificial sequence
  SiRNA target sequence
tcagcaacttataacgaacac

SEQ ID NO: 299139 - DNA, 21 bp, Artificial sequence
  SiRNA target sequence
cagcaacttataacgaacacg

SEQ ID NO: 299140 - DNA, 21 bp, Artificial sequence
  SiRNA target sequence
agcaacttataacgaacacga

SEQ ID NO: 299141 - DNA, 21 bp, Artificial sequence
  SiRNA target sequence
gcaacttataacgaacacgaa

SEQ ID NO: 299142 - DNA, 21 bp, Artificial sequence
  SiRNA target sequence
caacttataacgaacacgaat

SEQ ID NO: 299143 - DNA, 21 bp, Artificial sequence
  SiRNA target sequence
aacttataacgaacacgaatt

SEQ ID NO: 299144 - DNA, 21 bp, Artificial sequence
  SiRNA target sequence
acttataacgaacacgaattt

SEQ ID NO: 299145 - DNA, 21 bp, Artificial sequence
  SiRNA target sequence
cttataacgaacacgaatttt

SEQ ID NO: 299146 - DNA, 21 bp, Artificial sequence
  SiRNA target sequence
ttataacgaacacgaatttta

SEQ ID NO: 299147 - DNA, 21 bp, Artificial sequence
  SiRNA target sequence
tataacgaacacgaattttag

SEQ ID NO: 299148 - DNA, 21 bp, Artificial sequence
  SiRNA target sequence
ataacgaacacgaattttagt

SEQ ID NO: 299149 - DNA, 21 bp, Artificial sequence
  SiRNA target sequence
taacgaacacgaattttagtc

SEQ ID NO: 299150 - DNA, 21 bp, Artificial sequence
  SiRNA target sequence
aacgaacacgaattttagtcg

SEQ ID NO: 299151 - DNA, 21 bp, Artificial sequence
  SiRNA target sequence
acgaacacgaattttagtcga

SEQ ID NO: 299152 - DNA, 21 bp, Artificial sequence
  SiRNA target sequence
cgaacacgaattttagtcgac

SEQ ID NO: 299153 - DNA, 21 bp, Artificial sequence
  SiRNA target sequence
gaacacgaattttagtcgacg

SEQ ID NO: 299154 - DNA, 21 bp, Artificial sequence
  SiRNA target sequence
aacacgaattttagtcgacga

SEQ ID NO: 299155 - DNA, 21 bp, Artificial sequence
  SiRNA target sequence
acacgaattttagtcgacgaa

SEQ ID NO: 299156 - DNA, 21 bp, Artificial sequence
  SiRNA target sequence
cacgaattttagtcgacgaaa

SEQ ID NO: 299157 - DNA, 21 bp, Artificial sequence
  SiRNA target sequence
acgaattttagtcgacgaaac

SEQ ID NO: 299158 - DNA, 21 bp, Artificial sequence
  SiRNA target sequence
cgaattttagtcgacgaaacc

SEQ ID NO: 299159 - DNA, 21 bp, Artificial sequence
  SiRNA target sequence
gaattttagtcgacgaaacca

SEQ ID NO: 299160 - DNA, 21 bp, Artificial sequence
  SiRNA target sequence
aattttagtcgacgaaaccat

SEQ ID NO: 299161 - DNA, 21 bp, Artificial sequence
  SiRNA target sequence
attttagtcgacgaaaccatt

SEQ ID NO: 299162 - DNA, 21 bp, Artificial sequence
  SiRNA target sequence
ttttagtcgacgaaaccattt

SEQ ID NO: 299163 - DNA, 21 bp, Artificial sequence
  SiRNA target sequence
tttagtcgacgaaaccatttt

SEQ ID NO: 299164 - DNA, 21 bp, Artificial sequence
  SiRNA target sequence
ttagtcgacgaaaccatttta

SEQ ID NO: 299165 - DNA, 21 bp, Artificial sequence
  SiRNA target sequence
tagtcgacgaaaccattttag

SEQ ID NO: 299166 - DNA, 21 bp, Artificial sequence
  SiRNA target sequence
agtcgacgaaaccattttagc

SEQ ID NO: 299167 - DNA, 21 bp, Artificial sequence
  SiRNA target sequence
gtcgacgaaaccattttagcc

SEQ ID NO: 299168 - DNA, 21 bp, Artificial sequence
  SiRNA target sequence
tcgacgaaaccattttagcct

SEQ ID NO: 299169 - DNA, 21 bp, Artificial sequence
  SiRNA target sequence
cgacgaaaccattttagcctt

SEQ ID NO: 299170 - DNA, 21 bp, Artificial sequence
  SiRNA target sequence
gacgaaaccattttagccttt

SEQ ID NO: 299171 - DNA, 21 bp, Artificial sequence
  SiRNA target sequence
acgaaaccattttagccttta

SEQ ID NO: 299172 - DNA, 21 bp, Artificial sequence
  SiRNA target sequence
cgaaaccattttagcctttaa

SEQ ID NO: 299173 - DNA, 21 bp, Artificial sequence
  SiRNA target sequence
gaaaccattttagcctttaat

SEQ ID NO: 299174 - DNA, 21 bp, Artificial sequence
  SiRNA target sequence
aaaccattttagcctttaatt

SEQ ID NO: 299175 - DNA, 21 bp, Artificial sequence
  SiRNA target sequence
aaccattttagcctttaattc

SEQ ID NO: 299176 - DNA, 21 bp, Artificial sequence
  SiRNA target sequence
accattttagcctttaattct

SEQ ID NO: 299177 - DNA, 21 bp, Artificial sequence
  SiRNA target sequence
ccattttagcctttaattcta

SEQ ID NO: 299178 - DNA, 21 bp, Artificial sequence
  SiRNA target sequence
cattttagcctttaattctat

SEQ ID NO: 299179 - DNA, 21 bp, Artificial sequence
  SiRNA target sequence
attttagcctttaattctatg

SEQ ID NO: 299180 - DNA, 21 bp, Artificial sequence
  SiRNA target sequence
ttttagcctttaattctatga

SEQ ID NO: 299181 - DNA, 21 bp, Artificial sequence
  SiRNA target sequence
tttagcctttaattctatgat

SEQ ID NO: 299182 - DNA, 21 bp, Artificial sequence
  SiRNA target sequence
ttagcctttaattctatgatt

SEQ ID NO: 299183 - DNA, 21 bp, Artificial sequence
  SiRNA target sequence
tagcctttaattctatgattt

SEQ ID NO: 299184 - DNA, 21 bp, Artificial sequence
  SiRNA target sequence
agcctttaattctatgatttg

SEQ ID NO: 299185 - DNA, 21 bp, Artificial sequence
  SiRNA target sequence
gcctttaattctatgatttga

SEQ ID NO: 299186 - DNA, 21 bp, Artificial sequence
  SiRNA target sequence
cctttaattctatgatttgat

SEQ ID NO: 299187 - DNA, 21 bp, Artificial sequence
  SiRNA target sequence
ctttaattctatgatttgatt

SEQ ID NO: 299188 - DNA, 21 bp, Artificial sequence
  SiRNA target sequence
tttaattctatgatttgatta

SEQ ID NO: 299189 - DNA, 21 bp, Artificial sequence
  SiRNA target sequence
ttaattctatgatttgattat

SEQ ID NO: 299190 - DNA, 21 bp, Artificial sequence
  SiRNA target sequence
taattctatgatttgattata

SEQ ID NO: 299191 - DNA, 21 bp, Artificial sequence
  SiRNA target sequence
aattctatgatttgattataa

SEQ ID NO: 299192 - DNA, 21 bp, Artificial sequence
  SiRNA target sequence
attctatgatttgattataat

SEQ ID NO: 299193 - DNA, 21 bp, Artificial sequence
  SiRNA target sequence
ttctatgatttgattataatg

SEQ ID NO: 299194 - DNA, 21 bp, Artificial sequence
  SiRNA target sequence
tctatgatttgattataatga

SEQ ID NO: 299195 - DNA, 21 bp, Artificial sequence
  SiRNA target sequence
ctatgatttgattataatgat

SEQ ID NO: 299196 - DNA, 21 bp, Artificial sequence
  SiRNA target sequence
tatgatttgattataatgata

SEQ ID NO: 299197 - DNA, 21 bp, Artificial sequence
  SiRNA target sequence
atgatttgattataatgataa

SEQ ID NO: 299198 - DNA, 21 bp, Artificial sequence
  SiRNA target sequence
tgatttgattataatgataaa

SEQ ID NO: 299199 - DNA, 21 bp, Artificial sequence
  SiRNA target sequence
gatttgattataatgataaac

SEQ ID NO: 299200 - DNA, 21 bp, Artificial sequence
  SiRNA target sequence
atttgattataatgataaaca

SEQ ID NO: 299201 - DNA, 21 bp, Artificial sequence
  SiRNA target sequence
tttgattataatgataaacag

SEQ ID NO: 299202 - DNA, 21 bp, Artificial sequence
  SiRNA target sequence
ttgattataatgataaacagc

SEQ ID NO: 299203 - DNA, 21 bp, Artificial sequence
  SiRNA target sequence
tgattataatgataaacagct

SEQ ID NO: 299204 - DNA, 21 bp, Artificial sequence
  SiRNA target sequence
gattataatgataaacagctc

SEQ ID NO: 299205 - DNA, 21 bp, Artificial sequence
  SiRNA target sequence
attataatgataaacagctca

SEQ ID NO: 299206 - DNA, 21 bp, Artificial sequence
  SiRNA target sequence
ttataatgataaacagctcat

SEQ ID NO: 299207 - DNA, 21 bp, Artificial sequence
  SiRNA target sequence
tataatgataaacagctcatg

SEQ ID NO: 299208 - DNA, 21 bp, Artificial sequence
  SiRNA target sequence
ataatgataaacagctcatgt

SEQ ID NO: 299209 - DNA, 21 bp, Artificial sequence
  SiRNA target sequence
taatgataaacagctcatgta

SEQ ID NO: 299210 - DNA, 21 bp, Artificial sequence
  SiRNA target sequence
aatgataaacagctcatgtaa

SEQ ID NO: 299211 - DNA, 21 bp, Artificial sequence
  SiRNA target sequence
atgataaacagctcatgtaac

SEQ ID NO: 299212 - DNA, 21 bp, Artificial sequence
  SiRNA target sequence
tgataaacagctcatgtaact

SEQ ID NO: 299213 - DNA, 21 bp, Artificial sequence
  SiRNA target sequence
gataaacagctcatgtaactg

SEQ ID NO: 299214 - DNA, 21 bp, Artificial sequence
  SiRNA target sequence
ataaacagctcatgtaactgt

SEQ ID NO: 299215 - DNA, 21 bp, Artificial sequence
  SiRNA target sequence
taaacagctcatgtaactgtc

SEQ ID NO: 299216 - DNA, 21 bp, Artificial sequence
  SiRNA target sequence
aaacagctcatgtaactgtct

SEQ ID NO: 299217 - DNA, 21 bp, Artificial sequence
  SiRNA target sequence
aacagctcatgtaactgtcta

SEQ ID NO: 299218 - DNA, 21 bp, Artificial sequence
  SiRNA target sequence
acagctcatgtaactgtctaa

SEQ ID NO: 299219 - DNA, 21 bp, Artificial sequence
  SiRNA target sequence
cagctcatgtaactgtctaaa

SEQ ID NO: 299220 - DNA, 21 bp, Artificial sequence
  SiRNA target sequence
agctcatgtaactgtctaaac

SEQ ID NO: 299221 - DNA, 21 bp, Artificial sequence
  SiRNA target sequence
gctcatgtaactgtctaaact

SEQ ID NO: 299222 - DNA, 21 bp, Artificial sequence
  SiRNA target sequence
ctcatgtaactgtctaaacta

SEQ ID NO: 299223 - DNA, 21 bp, Artificial sequence
  SiRNA target sequence
tcatgtaactgtctaaactac

SEQ ID NO: 299224 - DNA, 21 bp, Artificial sequence
  SiRNA target sequence
catgtaactgtctaaactaca

SEQ ID NO: 299225 - DNA, 21 bp, Artificial sequence
  SiRNA target sequence
atgtaactgtctaaactacat

SEQ ID NO: 299226 - DNA, 21 bp, Artificial sequence
  SiRNA target sequence
tgtaactgtctaaactacata

SEQ ID NO: 299227 - DNA, 21 bp, Artificial sequence
  SiRNA target sequence
gtaactgtctaaactacataa

SEQ ID NO: 299228 - DNA, 21 bp, Artificial sequence
  SiRNA target sequence
taactgtctaaactacataaa

SEQ ID NO: 299229 - DNA, 21 bp, Artificial sequence
  SiRNA target sequence
aactgtctaaactacataaat

SEQ ID NO: 299230 - DNA, 21 bp, Artificial sequence
  SiRNA target sequence
actgtctaaactacataaata

SEQ ID NO: 299231 - DNA, 21 bp, Artificial sequence
  SiRNA target sequence
ctgtctaaactacataaatac

SEQ ID NO: 299232 - DNA, 21 bp, Artificial sequence
  SiRNA target sequence
tgtctaaactacataaataca

SEQ ID NO: 299233 - DNA, 21 bp, Artificial sequence
  SiRNA target sequence
gtctaaactacataaatacaa

SEQ ID NO: 299234 - DNA, 21 bp, Artificial sequence
  SiRNA target sequence
tctaaactacataaatacaac

SEQ ID NO: 299235 - DNA, 21 bp, Artificial sequence
  SiRNA target sequence
ctaaactacataaatacaact

SEQ ID NO: 299236 - DNA, 21 bp, Artificial sequence
  SiRNA target sequence
taaactacataaatacaactg

SEQ ID NO: 299237 - DNA, 21 bp, Artificial sequence
  SiRNA target sequence
aaactacataaatacaactgg

SEQ ID NO: 299238 - DNA, 21 bp, Artificial sequence
  SiRNA target sequence
aactacataaatacaactgga

SEQ ID NO: 299239 - DNA, 21 bp, Artificial sequence
  SiRNA target sequence
actacataaatacaactggat

SEQ ID NO: 299240 - DNA, 21 bp, Artificial sequence
  SiRNA target sequence
ctacataaatacaactggatt

SEQ ID NO: 299241 - DNA, 21 bp, Artificial sequence
  SiRNA target sequence
tacataaatacaactggatta

SEQ ID NO: 299242 - DNA, 21 bp, Artificial sequence
  SiRNA target sequence
acataaatacaactggattac

SEQ ID NO: 299243 - DNA, 21 bp, Artificial sequence
  SiRNA target sequence
cataaatacaactggattacg

SEQ ID NO: 299244 - DNA, 21 bp, Artificial sequence
  SiRNA target sequence
ataaatacaactggattacga

SEQ ID NO: 299245 - DNA, 21 bp, Artificial sequence
  SiRNA target sequence
taaatacaactggattacgaa

SEQ ID NO: 299246 - DNA, 21 bp, Artificial sequence
  SiRNA target sequence
aaatacaactggattacgaac

SEQ ID NO: 299247 - DNA, 21 bp, Artificial sequence
  SiRNA target sequence
aatacaactggattacgaacc

SEQ ID NO: 299248 - DNA, 21 bp, Artificial sequence
  SiRNA target sequence
atacaactggattacgaacct

SEQ ID NO: 299249 - DNA, 21 bp, Artificial sequence
  SiRNA target sequence
tacaactggattacgaacctt

SEQ ID NO: 299250 - DNA, 21 bp, Artificial sequence
  SiRNA target sequence
acaactggattacgaaccttt

SEQ ID NO: 299251 - DNA, 21 bp, Artificial sequence
  SiRNA target sequence
caactggattacgaaccttta

SEQ ID NO: 299252 - DNA, 21 bp, Artificial sequence
  SiRNA target sequence
aactggattacgaacctttaa

SEQ ID NO: 299253 - DNA, 21 bp, Artificial sequence
  SiRNA target sequence
actggattacgaacctttaag

SEQ ID NO: 299254 - DNA, 21 bp, Artificial sequence
  SiRNA target sequence
ctggattacgaacctttaagt

SEQ ID NO: 299255 - DNA, 21 bp, Artificial sequence
  SiRNA target sequence
tggattacgaacctttaagta

SEQ ID NO: 299256 - DNA, 21 bp, Artificial sequence
  SiRNA target sequence
ggattacgaacctttaagtaa

SEQ ID NO: 299257 - DNA, 21 bp, Artificial sequence
  SiRNA target sequence
gattacgaacctttaagtaac

SEQ ID NO: 299258 - DNA, 21 bp, Artificial sequence
  SiRNA target sequence
attacgaacctttaagtaact

SEQ ID NO: 299259 - DNA, 21 bp, Artificial sequence
  SiRNA target sequence
ttacgaacctttaagtaacta

SEQ ID NO: 299260 - DNA, 21 bp, Artificial sequence
  SiRNA target sequence
tacgaacctttaagtaactat

SEQ ID NO: 299261 - DNA, 21 bp, Artificial sequence
  SiRNA target sequence
acgaacctttaagtaactatc

SEQ ID NO: 299262 - DNA, 21 bp, Artificial sequence
  SiRNA target sequence
cgaacctttaagtaactatct

SEQ ID NO: 299263 - DNA, 21 bp, Artificial sequence
  SiRNA target sequence
gaacctttaagtaactatctt

SEQ ID NO: 299264 - DNA, 21 bp, Artificial sequence
  SiRNA target sequence
aacctttaagtaactatctta

SEQ ID NO: 299265 - DNA, 21 bp, Artificial sequence
  SiRNA target sequence
acctttaagtaactatcttag

SEQ ID NO: 299266 - DNA, 21 bp, Artificial sequence
  SiRNA target sequence
cctttaagtaactatcttaga

SEQ ID NO: 299267 - DNA, 21 bp, Artificial sequence
  SiRNA target sequence
ctttaagtaactatcttagat

SEQ ID NO: 299268 - DNA, 21 bp, Artificial sequence
  SiRNA target sequence
tttaagtaactatcttagatg

SEQ ID NO: 299269 - DNA, 21 bp, Artificial sequence
  SiRNA target sequence
ttaagtaactatcttagatga

SEQ ID NO: 299270 - DNA, 21 bp, Artificial sequence
  SiRNA target sequence
taagtaactatcttagatgaa

SEQ ID NO: 299271 - DNA, 21 bp, Artificial sequence
  SiRNA target sequence
aagtaactatcttagatgaag

SEQ ID NO: 299272 - DNA, 21 bp, Artificial sequence
  SiRNA target sequence
agtaactatcttagatgaagt

SEQ ID NO: 299273 - DNA, 21 bp, Artificial sequence
  SiRNA target sequence
gtaactatcttagatgaagtc

SEQ ID NO: 299274 - DNA, 21 bp, Artificial sequence
  SiRNA target sequence
taactatcttagatgaagtct

SEQ ID NO: 299275 - DNA, 21 bp, Artificial sequence
  SiRNA target sequence
aactatcttagatgaagtcta

SEQ ID NO: 299276 - DNA, 21 bp, Artificial sequence
  SiRNA target sequence
actatcttagatgaagtctag

SEQ ID NO: 299277 - DNA, 21 bp, Artificial sequence
  SiRNA target sequence
ctatcttagatgaagtctagt

SEQ ID NO: 299278 - DNA, 21 bp, Artificial sequence
  SiRNA target sequence
tatcttagatgaagtctagta

SEQ ID NO: 299279 - DNA, 21 bp, Artificial sequence
  SiRNA target sequence
atcttagatgaagtctagtag

SEQ ID NO: 299280 - DNA, 21 bp, Artificial sequence
  SiRNA target sequence
tcttagatgaagtctagtagt

SEQ ID NO: 299281 - DNA, 21 bp, Artificial sequence
  SiRNA target sequence
cttagatgaagtctagtagtc

SEQ ID NO: 299282 - DNA, 21 bp, Artificial sequence
  SiRNA target sequence
ttagatgaagtctagtagtct

SEQ ID NO: 299283 - DNA, 21 bp, Artificial sequence
  SiRNA target sequence
tagatgaagtctagtagtctc

SEQ ID NO: 299284 - DNA, 21 bp, Artificial sequence
  SiRNA target sequence
agatgaagtctagtagtctcc

SEQ ID NO: 299285 - DNA, 21 bp, Artificial sequence
  SiRNA target sequence
gatgaagtctagtagtctccc

SEQ ID NO: 299286 - DNA, 21 bp, Artificial sequence
  SiRNA target sequence
atgaagtctagtagtctccca

SEQ ID NO: 299287 - DNA, 21 bp, Artificial sequence
  SiRNA target sequence
tgaagtctagtagtctcccaa

SEQ ID NO: 299288 - DNA, 21 bp, Artificial sequence
  SiRNA target sequence
gaagtctagtagtctcccaat

SEQ ID NO: 299289 - DNA, 21 bp, Artificial sequence
  SiRNA target sequence
aagtctagtagtctcccaata

SEQ ID NO: 299290 - DNA, 21 bp, Artificial sequence
  SiRNA target sequence
agtctagtagtctcccaatat

SEQ ID NO: 299291 - DNA, 21 bp, Artificial sequence
  SiRNA target sequence
gtctagtagtctcccaatatt

SEQ ID NO: 299292 - DNA, 21 bp, Artificial sequence
  SiRNA target sequence
tctagtagtctcccaatattt

SEQ ID NO: 299293 - DNA, 21 bp, Artificial sequence
  SiRNA target sequence
ctagtagtctcccaatatttc

SEQ ID NO: 299294 - DNA, 21 bp, Artificial sequence
  SiRNA target sequence
tagtagtctcccaatatttcc

SEQ ID NO: 299295 - DNA, 21 bp, Artificial sequence
  SiRNA target sequence
agtagtctcccaatatttccg

SEQ ID NO: 299296 - DNA, 21 bp, Artificial sequence
  SiRNA target sequence
gtagtctcccaatatttccgt

SEQ ID NO: 299297 - DNA, 21 bp, Artificial sequence
  SiRNA target sequence
tagtctcccaatatttccgtg

SEQ ID NO: 299298 - DNA, 21 bp, Artificial sequence
  SiRNA target sequence
agtctcccaatatttccgtga

SEQ ID NO: 299299 - DNA, 21 bp, Artificial sequence
  SiRNA target sequence
gtctcccaatatttccgtgaa

SEQ ID NO: 299300 - DNA, 21 bp, Artificial sequence
  SiRNA target sequence
tctcccaatatttccgtgaaa

SEQ ID NO: 299301 - DNA, 21 bp, Artificial sequence
  SiRNA target sequence
ctcccaatatttccgtgaaaa

SEQ ID NO: 299302 - DNA, 21 bp, Artificial sequence
  SiRNA target sequence
tcccaatatttccgtgaaaag

SEQ ID NO: 299303 - DNA, 21 bp, Artificial sequence
  SiRNA target sequence
cccaatatttccgtgaaaaga

SEQ ID NO: 299304 - DNA, 21 bp, Artificial sequence
  SiRNA target sequence
ccaatatttccgtgaaaagaa

SEQ ID NO: 299305 - DNA, 21 bp, Artificial sequence
  SiRNA target sequence
caatatttccgtgaaaagaat

SEQ ID NO: 299306 - DNA, 21 bp, Artificial sequence
  SiRNA target sequence
aatatttccgtgaaaagaatg

SEQ ID NO: 299307 - DNA, 21 bp, Artificial sequence
  SiRNA target sequence
atatttccgtgaaaagaatga

SEQ ID NO: 299308 - DNA, 21 bp, Artificial sequence
  SiRNA target sequence
tatttccgtgaaaagaatgag

SEQ ID NO: 299309 - DNA, 21 bp, Artificial sequence
  SiRNA target sequence
atttccgtgaaaagaatgagg

SEQ ID NO: 299310 - DNA, 21 bp, Artificial sequence
  SiRNA target sequence
tttccgtgaaaagaatgaggg

SEQ ID NO: 299311 - DNA, 21 bp, Artificial sequence
  SiRNA target sequence
ttccgtgaaaagaatgaggga

SEQ ID NO: 299312 - DNA, 21 bp, Artificial sequence
  SiRNA target sequence
tccgtgaaaagaatgagggac

SEQ ID NO: 299313 - DNA, 21 bp, Artificial sequence
  SiRNA target sequence
ccgtgaaaagaatgagggacg

SEQ ID NO: 299314 - DNA, 21 bp, Artificial sequence
  SiRNA target sequence
cgtgaaaagaatgagggacga

SEQ ID NO: 299315 - DNA, 21 bp, Artificial sequence
  SiRNA target sequence
gtgaaaagaatgagggacgag

SEQ ID NO: 299316 - DNA, 21 bp, Artificial sequence
  SiRNA target sequence
tgaaaagaatgagggacgaga

SEQ ID NO: 299317 - DNA, 21 bp, Artificial sequence
  SiRNA target sequence
gaaaagaatgagggacgagat

SEQ ID NO: 299318 - DNA, 21 bp, Artificial sequence
  SiRNA target sequence
aaaagaatgagggacgagata

SEQ ID NO: 299319 - DNA, 21 bp, Artificial sequence
  SiRNA target sequence
aaagaatgagggacgagatag

SEQ ID NO: 299320 - DNA, 21 bp, Artificial sequence
  SiRNA target sequence
aagaatgagggacgagatagc

SEQ ID NO: 299321 - DNA, 21 bp, Artificial sequence
  SiRNA target sequence
agaatgagggacgagatagct

SEQ ID NO: 299322 - DNA, 21 bp, Artificial sequence
  SiRNA target sequence
gaatgagggacgagatagctc

SEQ ID NO: 299323 - DNA, 21 bp, Artificial sequence
  SiRNA target sequence
aatgagggacgagatagctct

SEQ ID NO: 299324 - DNA, 21 bp, Artificial sequence
  SiRNA target sequence
atgagggacgagatagctcta

SEQ ID NO: 299325 - DNA, 21 bp, Artificial sequence
  SiRNA target sequence
tgagggacgagatagctctat

SEQ ID NO: 299326 - DNA, 21 bp, Artificial sequence
  SiRNA target sequence
gagggacgagatagctctatt

SEQ ID NO: 299327 - DNA, 21 bp, Artificial sequence
  SiRNA target sequence
agggacgagatagctctattt

SEQ ID NO: 299328 - DNA, 21 bp, Artificial sequence
  SiRNA target sequence
gggacgagatagctctattta

SEQ ID NO: 299329 - DNA, 21 bp, Artificial sequence
  SiRNA target sequence
ggacgagatagctctatttaa

SEQ ID NO: 299330 - DNA, 21 bp, Artificial sequence
  SiRNA target sequence
gacgagatagctctatttaaa

SEQ ID NO: 299331 - DNA, 21 bp, Artificial sequence
  SiRNA target sequence
acgagatagctctatttaaag

SEQ ID NO: 299332 - DNA, 21 bp, Artificial sequence
  SiRNA target sequence
cgagatagctctatttaaaga

SEQ ID NO: 299333 - DNA, 21 bp, Artificial sequence
  SiRNA target sequence
gagatagctctatttaaagac

SEQ ID NO: 299334 - DNA, 21 bp, Artificial sequence
  SiRNA target sequence
agatagctctatttaaagacg

SEQ ID NO: 299335 - DNA, 21 bp, Artificial sequence
  SiRNA target sequence
gatagctctatttaaagacgt

SEQ ID NO: 299336 - DNA, 21 bp, Artificial sequence
  SiRNA target sequence
atagctctatttaaagacgtg

SEQ ID NO: 299337 - DNA, 21 bp, Artificial sequence
  SiRNA target sequence
tagctctatttaaagacgtga

SEQ ID NO: 299338 - DNA, 21 bp, Artificial sequence
  SiRNA target sequence
agctctatttaaagacgtgag

SEQ ID NO: 299339 - DNA, 21 bp, Artificial sequence
  SiRNA target sequence
gctctatttaaagacgtgagg

SEQ ID NO: 299340 - DNA, 21 bp, Artificial sequence
  SiRNA target sequence
ctctatttaaagacgtgaggc

SEQ ID NO: 299341 - DNA, 21 bp, Artificial sequence
  SiRNA target sequence
tctatttaaagacgtgaggct

SEQ ID NO: 299342 - DNA, 21 bp, Artificial sequence
  SiRNA target sequence
ctatttaaagacgtgaggctt

SEQ ID NO: 299343 - DNA, 21 bp, Artificial sequence
  SiRNA target sequence
tatttaaagacgtgaggcttt

SEQ ID NO: 299344 - DNA, 21 bp, Artificial sequence
  SiRNA target sequence
atttaaagacgtgaggcttta

SEQ ID NO: 299345 - DNA, 21 bp, Artificial sequence
  SiRNA target sequence
tttaaagacgtgaggctttaa

SEQ ID NO: 299346 - DNA, 21 bp, Artificial sequence
  SiRNA target sequence
ttaaagacgtgaggctttaaa

SEQ ID NO: 299347 - DNA, 21 bp, Artificial sequence
  SiRNA target sequence
taaagacgtgaggctttaaat

SEQ ID NO: 299348 - DNA, 21 bp, Artificial sequence
  SiRNA target sequence
aaagacgtgaggctttaaatt

SEQ ID NO: 299349 - DNA, 21 bp, Artificial sequence
  SiRNA target sequence
aagacgtgaggctttaaattc

SEQ ID NO: 299350 - DNA, 21 bp, Artificial sequence
  SiRNA target sequence
agacgtgaggctttaaattct

SEQ ID NO: 299351 - DNA, 21 bp, Artificial sequence
  SiRNA target sequence
gacgtgaggctttaaattctg

SEQ ID NO: 299352 - DNA, 21 bp, Artificial sequence
  SiRNA target sequence
acgtgaggctttaaattctga

SEQ ID NO: 299353 - DNA, 21 bp, Artificial sequence
  SiRNA target sequence
cgtgaggctttaaattctgat

SEQ ID NO: 299354 - DNA, 21 bp, Artificial sequence
  SiRNA target sequence
gtgaggctttaaattctgata

SEQ ID NO: 299355 - DNA, 21 bp, Artificial sequence
  SiRNA target sequence
tgaggctttaaattctgataa

SEQ ID NO: 299356 - DNA, 21 bp, Artificial sequence
  SiRNA target sequence
gaggctttaaattctgataaa

SEQ ID NO: 299357 - DNA, 21 bp, Artificial sequence
  SiRNA target sequence
aggctttaaattctgataaat

SEQ ID NO: 299358 - DNA, 21 bp, Artificial sequence
  SiRNA target sequence
ggctttaaattctgataaata

SEQ ID NO: 299359 - DNA, 21 bp, Artificial sequence
  SiRNA target sequence
gctttaaattctgataaatac

SEQ ID NO: 299360 - DNA, 21 bp, Artificial sequence
  SiRNA target sequence
ctttaaattctgataaataca

SEQ ID NO: 299361 - DNA, 21 bp, Artificial sequence
  SiRNA target sequence
tttaaattctgataaatacat

SEQ ID NO: 299362 - DNA, 21 bp, Artificial sequence
  SiRNA target sequence
ttaaattctgataaatacatt

SEQ ID NO: 299363 - DNA, 21 bp, Artificial sequence
  SiRNA target sequence
taaattctgataaatacatta

SEQ ID NO: 299364 - DNA, 21 bp, Artificial sequence
  SiRNA target sequence
aaattctgataaatacattac

SEQ ID NO: 299365 - DNA, 21 bp, Artificial sequence
  SiRNA target sequence
aattctgataaatacattacc

SEQ ID NO: 299366 - DNA, 21 bp, Artificial sequence
  SiRNA target sequence
attctgataaatacattacct

SEQ ID NO: 299367 - DNA, 21 bp, Artificial sequence
  SiRNA target sequence
ttctgataaatacattacctg

SEQ ID NO: 299368 - DNA, 21 bp, Artificial sequence
  SiRNA target sequence
tctgataaatacattacctga

SEQ ID NO: 299369 - DNA, 21 bp, Artificial sequence
  SiRNA target sequence
ctgataaatacattacctgag

SEQ ID NO: 299370 - DNA, 21 bp, Artificial sequence
  SiRNA target sequence
tgataaatacattacctgaga

SEQ ID NO: 299371 - DNA, 21 bp, Artificial sequence
  SiRNA target sequence
gataaatacattacctgagaa

SEQ ID NO: 299372 - DNA, 21 bp, Artificial sequence
  SiRNA target sequence
ataaatacattacctgagaat

SEQ ID NO: 299373 - DNA, 21 bp, Artificial sequence
  SiRNA target sequence
taaatacattacctgagaatt

SEQ ID NO: 299374 - DNA, 21 bp, Artificial sequence
  SiRNA target sequence
aaatacattacctgagaattc

SEQ ID NO: 299375 - DNA, 21 bp, Artificial sequence
  SiRNA target sequence
aatacattacctgagaattcc

SEQ ID NO: 299376 - DNA, 21 bp, Artificial sequence
  SiRNA target sequence
atacattacctgagaattcct

SEQ ID NO: 299377 - DNA, 21 bp, Artificial sequence
  SiRNA target sequence
tacattacctgagaattcctc

SEQ ID NO: 299378 - DNA, 21 bp, Artificial sequence
  SiRNA target sequence
acattacctgagaattcctcc

SEQ ID NO: 299379 - DNA, 21 bp, Artificial sequence
  SiRNA target sequence
cattacctgagaattcctcct

SEQ ID NO: 299380 - DNA, 21 bp, Artificial sequence
  SiRNA target sequence
attacctgagaattcctcctt

SEQ ID NO: 299381 - DNA, 21 bp, Artificial sequence
  SiRNA target sequence
ttacctgagaattcctccttt

SEQ ID NO: 299382 - DNA, 21 bp, Artificial sequence
  SiRNA target sequence
tacctgagaattcctccttta

SEQ ID NO: 299383 - DNA, 21 bp, Artificial sequence
  SiRNA target sequence
acctgagaattcctcctttag

SEQ ID NO: 299384 - DNA, 21 bp, Artificial sequence
  SiRNA target sequence
cctgagaattcctcctttagg

SEQ ID NO: 299385 - DNA, 21 bp, Artificial sequence
  SiRNA target sequence
ctgagaattcctcctttagga

SEQ ID NO: 299386 - DNA, 21 bp, Artificial sequence
  SiRNA target sequence
tgagaattcctcctttaggag

SEQ ID NO: 299387 - DNA, 21 bp, Artificial sequence
  SiRNA target sequence
gagaattcctcctttaggagt

SEQ ID NO: 299388 - DNA, 21 bp, Artificial sequence
  SiRNA target sequence
agaattcctcctttaggagtt

SEQ ID NO: 299389 - DNA, 21 bp, Artificial sequence
  SiRNA target sequence
gaattcctcctttaggagtta

SEQ ID NO: 299390 - DNA, 21 bp, Artificial sequence
  SiRNA target sequence
aattcctcctttaggagttag

SEQ ID NO: 299391 - DNA, 21 bp, Artificial sequence
  SiRNA target sequence
attcctcctttaggagttaga

SEQ ID NO: 299392 - DNA, 21 bp, Artificial sequence
  SiRNA target sequence
ttcctcctttaggagttagaa

SEQ ID NO: 299393 - DNA, 21 bp, Artificial sequence
  SiRNA target sequence
tcctcctttaggagttagaat

SEQ ID NO: 299394 - DNA, 21 bp, Artificial sequence
  SiRNA target sequence
cctcctttaggagttagaatt

SEQ ID NO: 299395 - DNA, 21 bp, Artificial sequence
  SiRNA target sequence
ctcctttaggagttagaattt

SEQ ID NO: 299396 - DNA, 21 bp, Artificial sequence
  SiRNA target sequence
tcctttaggagttagaatttg

SEQ ID NO: 299397 - DNA, 21 bp, Artificial sequence
  SiRNA target sequence
cctttaggagttagaatttga

SEQ ID NO: 299398 - DNA, 21 bp, Artificial sequence
  SiRNA target sequence
ctttaggagttagaatttgaa

SEQ ID NO: 299399 - DNA, 21 bp, Artificial sequence
  SiRNA target sequence
tttaggagttagaatttgaaa

SEQ ID NO: 299400 - DNA, 21 bp, Artificial sequence
  SiRNA target sequence
ttaggagttagaatttgaaaa

SEQ ID NO: 299401 - DNA, 21 bp, Artificial sequence
  SiRNA target sequence
taggagttagaatttgaaaag

SEQ ID NO: 299402 - DNA, 21 bp, Artificial sequence
  SiRNA target sequence
aggagttagaatttgaaaaga

SEQ ID NO: 299403 - DNA, 21 bp, Artificial sequence
  SiRNA target sequence
ggagttagaatttgaaaagat

SEQ ID NO: 299404 - DNA, 21 bp, Artificial sequence
  SiRNA target sequence
gagttagaatttgaaaagatt

SEQ ID NO: 299405 - DNA, 21 bp, Artificial sequence
  SiRNA target sequence
agttagaatttgaaaagatta

SEQ ID NO: 299406 - DNA, 21 bp, Artificial sequence
  SiRNA target sequence
gttagaatttgaaaagattag

SEQ ID NO: 299407 - DNA, 21 bp, Artificial sequence
  SiRNA target sequence
ttagaatttgaaaagattagt

SEQ ID NO: 299408 - DNA, 21 bp, Artificial sequence
  SiRNA target sequence
tagaatttgaaaagattagta

SEQ ID NO: 299409 - DNA, 21 bp, Artificial sequence
  SiRNA target sequence
agaatttgaaaagattagtac

SEQ ID NO: 299410 - DNA, 21 bp, Artificial sequence
  SiRNA target sequence
gaatttgaaaagattagtacc

SEQ ID NO: 299411 - DNA, 21 bp, Artificial sequence
  SiRNA target sequence
aatttgaaaagattagtacct

SEQ ID NO: 299412 - DNA, 21 bp, Artificial sequence
  SiRNA target sequence
atttgaaaagattagtaccta

SEQ ID NO: 299413 - DNA, 21 bp, Artificial sequence
  SiRNA target sequence
tttgaaaagattagtacctat

SEQ ID NO: 299414 - DNA, 21 bp, Artificial sequence
  SiRNA target sequence
ttgaaaagattagtacctata

SEQ ID NO: 299415 - DNA, 21 bp, Artificial sequence
  SiRNA target sequence
tgaaaagattagtacctatac

SEQ ID NO: 299416 - DNA, 21 bp, Artificial sequence
  SiRNA target sequence
gaaaagattagtacctatact

SEQ ID NO: 299417 - DNA, 21 bp, Artificial sequence
  SiRNA target sequence
aaaagattagtacctatactt

SEQ ID NO: 299418 - DNA, 21 bp, Artificial sequence
  SiRNA target sequence
aaagattagtacctatactta

SEQ ID NO: 299419 - DNA, 21 bp, Artificial sequence
  SiRNA target sequence
aagattagtacctatacttaa

SEQ ID NO: 299420 - DNA, 21 bp, Artificial sequence
  SiRNA target sequence
agattagtacctatacttaat

SEQ ID NO: 299421 - DNA, 21 bp, Artificial sequence
  SiRNA target sequence
gattagtacctatacttaata

SEQ ID NO: 299422 - DNA, 21 bp, Artificial sequence
  SiRNA target sequence
attagtacctatacttaatag

SEQ ID NO: 299423 - DNA, 21 bp, Artificial sequence
  SiRNA target sequence
ttagtacctatacttaataga

SEQ ID NO: 299424 - DNA, 21 bp, Artificial sequence
  SiRNA target sequence
tagtacctatacttaatagaa

SEQ ID NO: 299425 - DNA, 21 bp, Artificial sequence
  SiRNA target sequence
agtacctatacttaatagaat

SEQ ID NO: 299426 - DNA, 21 bp, Artificial sequence
  SiRNA target sequence
gtacctatacttaatagaatt

SEQ ID NO: 299427 - DNA, 21 bp, Artificial sequence
  SiRNA target sequence
tacctatacttaatagaattt

SEQ ID NO: 299428 - DNA, 21 bp, Artificial sequence
  SiRNA target sequence
acctatacttaatagaattta

SEQ ID NO: 299429 - DNA, 21 bp, Artificial sequence
  SiRNA target sequence
cctatacttaatagaatttaa

SEQ ID NO: 299430 - DNA, 21 bp, Artificial sequence
  SiRNA target sequence
ctatacttaatagaatttaaa

SEQ ID NO: 299431 - DNA, 21 bp, Artificial sequence
  SiRNA target sequence
tatacttaatagaatttaaat

SEQ ID NO: 299432 - DNA, 21 bp, Artificial sequence
  SiRNA target sequence
atacttaatagaatttaaata

SEQ ID NO: 299433 - DNA, 21 bp, Artificial sequence
  SiRNA target sequence
tacttaatagaatttaaatat

SEQ ID NO: 299434 - DNA, 21 bp, Artificial sequence
  SiRNA target sequence
acttaatagaatttaaatatg

SEQ ID NO: 299435 - DNA, 21 bp, Artificial sequence
  SiRNA target sequence
cttaatagaatttaaatatgt

SEQ ID NO: 299436 - DNA, 21 bp, Artificial sequence
  SiRNA target sequence
ttaatagaatttaaatatgtt

SEQ ID NO: 299437 - DNA, 21 bp, Artificial sequence
  SiRNA target sequence
taatagaatttaaatatgtta

SEQ ID NO: 299438 - DNA, 21 bp, Artificial sequence
  SiRNA target sequence
aatagaatttaaatatgttaa

SEQ ID NO: 299439 - DNA, 21 bp, Artificial sequence
  SiRNA target sequence
atagaatttaaatatgttaat

SEQ ID NO: 299440 - DNA, 21 bp, Artificial sequence
  SiRNA target sequence
tagaatttaaatatgttaata

SEQ ID NO: 299441 - DNA, 21 bp, Artificial sequence
  SiRNA target sequence
agaatttaaatatgttaataa

SEQ ID NO: 299442 - DNA, 21 bp, Artificial sequence
  SiRNA target sequence
gaatttaaatatgttaataat

SEQ ID NO: 299443 - DNA, 21 bp, Artificial sequence
  SiRNA target sequence
aatttaaatatgttaataatg

SEQ ID NO: 299444 - DNA, 21 bp, Artificial sequence
  SiRNA target sequence
atttaaatatgttaataatgc

SEQ ID NO: 299445 - DNA, 21 bp, Artificial sequence
  SiRNA target sequence
tttaaatatgttaataatgct

SEQ ID NO: 299446 - DNA, 21 bp, Artificial sequence
  SiRNA target sequence
ttaaatatgttaataatgctg

SEQ ID NO: 299447 - DNA, 21 bp, Artificial sequence
  SiRNA target sequence
taaatatgttaataatgctga

SEQ ID NO: 299448 - DNA, 21 bp, Artificial sequence
  SiRNA target sequence
aaatatgttaataatgctgaa

SEQ ID NO: 299449 - DNA, 21 bp, Artificial sequence
  SiRNA target sequence
aatatgttaataatgctgaag

SEQ ID NO: 299450 - DNA, 21 bp, Artificial sequence
  SiRNA target sequence
atatgttaataatgctgaaga

SEQ ID NO: 299451 - DNA, 21 bp, Artificial sequence
  SiRNA target sequence
tatgttaataatgctgaagac

SEQ ID NO: 299452 - DNA, 21 bp, Artificial sequence
  SiRNA target sequence
atgttaataatgctgaagaca

SEQ ID NO: 299453 - DNA, 21 bp, Artificial sequence
  SiRNA target sequence
tgttaataatgctgaagacaa

SEQ ID NO: 299454 - DNA, 21 bp, Artificial sequence
  SiRNA target sequence
gttaataatgctgaagacaag

SEQ ID NO: 299455 - DNA, 21 bp, Artificial sequence
  SiRNA target sequence
ttaataatgctgaagacaagt

SEQ ID NO: 299456 - DNA, 21 bp, Artificial sequence
  SiRNA target sequence
taataatgctgaagacaagta

SEQ ID NO: 299457 - DNA, 21 bp, Artificial sequence
  SiRNA target sequence
aataatgctgaagacaagtat

SEQ ID NO: 299458 - DNA, 21 bp, Artificial sequence
  SiRNA target sequence
ataatgctgaagacaagtatt

SEQ ID NO: 299459 - DNA, 21 bp, Artificial sequence
  SiRNA target sequence
taatgctgaagacaagtattt

SEQ ID NO: 299460 - DNA, 21 bp, Artificial sequence
  SiRNA target sequence
aatgctgaagacaagtatttc

SEQ ID NO: 299461 - DNA, 21 bp, Artificial sequence
  SiRNA target sequence
atgctgaagacaagtatttcg

SEQ ID NO: 299462 - DNA, 21 bp, Artificial sequence
  SiRNA target sequence
tgctgaagacaagtatttcga

SEQ ID NO: 299463 - DNA, 21 bp, Artificial sequence
  SiRNA target sequence
gctgaagacaagtatttcgat

SEQ ID NO: 299464 - DNA, 21 bp, Artificial sequence
  SiRNA target sequence
ctgaagacaagtatttcgatt

SEQ ID NO: 299465 - DNA, 21 bp, Artificial sequence
  SiRNA target sequence
tgaagacaagtatttcgatta

SEQ ID NO: 299466 - DNA, 21 bp, Artificial sequence
  SiRNA target sequence
gaagacaagtatttcgattat

SEQ ID NO: 299467 - DNA, 21 bp, Artificial sequence
  SiRNA target sequence
aagacaagtatttcgattatt

SEQ ID NO: 299468 - DNA, 21 bp, Artificial sequence
  SiRNA target sequence
agacaagtatttcgattatta

SEQ ID NO: 299469 - DNA, 21 bp, Artificial sequence
  SiRNA target sequence
gacaagtatttcgattattaa

SEQ ID NO: 299470 - DNA, 21 bp, Artificial sequence
  SiRNA target sequence
acaagtatttcgattattaac

SEQ ID NO: 299471 - DNA, 21 bp, Artificial sequence
  SiRNA target sequence
caagtatttcgattattaacc

SEQ ID NO: 299472 - DNA, 21 bp, Artificial sequence
  SiRNA target sequence
aagtatttcgattattaacct

SEQ ID NO: 299473 - DNA, 21 bp, Artificial sequence
  SiRNA target sequence
agtatttcgattattaacctc

SEQ ID NO: 299474 - DNA, 21 bp, Artificial sequence
  SiRNA target sequence
gtatttcgattattaacctct

SEQ ID NO: 299475 - DNA, 21 bp, Artificial sequence
  SiRNA target sequence
tatttcgattattaacctcta

SEQ ID NO: 299476 - DNA, 21 bp, Artificial sequence
  SiRNA target sequence
atttcgattattaacctctat

SEQ ID NO: 299477 - DNA, 21 bp, Artificial sequence
  SiRNA target sequence
tttcgattattaacctctata

SEQ ID NO: 299478 - DNA, 21 bp, Artificial sequence
  SiRNA target sequence
ttcgattattaacctctatat

SEQ ID NO: 299479 - DNA, 21 bp, Artificial sequence
  SiRNA target sequence
tcgattattaacctctatatt

SEQ ID NO: 299480 - DNA, 21 bp, Artificial sequence
  SiRNA target sequence
cgattattaacctctatattt

SEQ ID NO: 299481 - DNA, 21 bp, Artificial sequence
  SiRNA target sequence
gattattaacctctatatttc

SEQ ID NO: 299482 - DNA, 21 bp, Artificial sequence
  SiRNA target sequence
attattaacctctatatttct

SEQ ID NO: 299483 - DNA, 21 bp, Artificial sequence
  SiRNA target sequence
ttattaacctctatatttcta

SEQ ID NO: 299484 - DNA, 21 bp, Artificial sequence
  SiRNA target sequence
tattaacctctatatttctat

SEQ ID NO: 299485 - DNA, 21 bp, Artificial sequence
  SiRNA target sequence
attaacctctatatttctata

SEQ ID NO: 299486 - DNA, 21 bp, Artificial sequence
  SiRNA target sequence
ttaacctctatatttctatat

SEQ ID NO: 299487 - DNA, 21 bp, Artificial sequence
  SiRNA target sequence
taacctctatatttctatata

SEQ ID NO: 299488 - DNA, 21 bp, Artificial sequence
  SiRNA target sequence
aacctctatatttctatataa

SEQ ID NO: 299489 - DNA, 21 bp, Artificial sequence
  SiRNA target sequence
acctctatatttctatataaa

SEQ ID NO: 299490 - DNA, 21 bp, Artificial sequence
  SiRNA target sequence
cctctatatttctatataaag

SEQ ID NO: 299491 - DNA, 21 bp, Artificial sequence
  SiRNA target sequence
ctctatatttctatataaagt

SEQ ID NO: 299492 - DNA, 21 bp, Artificial sequence
  SiRNA target sequence
tctatatttctatataaagta

SEQ ID NO: 299493 - DNA, 21 bp, Artificial sequence
  SiRNA target sequence
ctatatttctatataaagtat

SEQ ID NO: 299494 - DNA, 21 bp, Artificial sequence
  SiRNA target sequence
tatatttctatataaagtatc

SEQ ID NO: 299495 - DNA, 21 bp, Artificial sequence
  SiRNA target sequence
atatttctatataaagtatct

SEQ ID NO: 299496 - DNA, 21 bp, Artificial sequence
  SiRNA target sequence
tatttctatataaagtatctg

SEQ ID NO: 299497 - DNA, 21 bp, Artificial sequence
  SiRNA target sequence
atttctatataaagtatctgt

SEQ ID NO: 299498 - DNA, 21 bp, Artificial sequence
  SiRNA target sequence
tttctatataaagtatctgtg

SEQ ID NO: 299499 - DNA, 21 bp, Artificial sequence
  SiRNA target sequence
ttctatataaagtatctgtga

SEQ ID NO: 299500 - DNA, 21 bp, Artificial sequence
  SiRNA target sequence
tctatataaagtatctgtgag

SEQ ID NO: 299501 - DNA, 21 bp, Artificial sequence
  SiRNA target sequence
ctatataaagtatctgtgagt

SEQ ID NO: 299502 - DNA, 21 bp, Artificial sequence
  SiRNA target sequence
tatataaagtatctgtgagtc

SEQ ID NO: 299503 - DNA, 21 bp, Artificial sequence
  SiRNA target sequence
atataaagtatctgtgagtct

SEQ ID NO: 299504 - DNA, 21 bp, Artificial sequence
  SiRNA target sequence
tataaagtatctgtgagtctc

SEQ ID NO: 299505 - DNA, 21 bp, Artificial sequence
  SiRNA target sequence
ataaagtatctgtgagtctca

SEQ ID NO: 299506 - DNA, 21 bp, Artificial sequence
  SiRNA target sequence
taaagtatctgtgagtctcag

SEQ ID NO: 299507 - DNA, 21 bp, Artificial sequence
  SiRNA target sequence
aaagtatctgtgagtctcagt

SEQ ID NO: 299508 - DNA, 21 bp, Artificial sequence
  SiRNA target sequence
aagtatctgtgagtctcagtg

SEQ ID NO: 299509 - DNA, 21 bp, Artificial sequence
  SiRNA target sequence
agtatctgtgagtctcagtgg

SEQ ID NO: 299510 - DNA, 21 bp, Artificial sequence
  SiRNA target sequence
gtatctgtgagtctcagtgga

SEQ ID NO: 299511 - DNA, 21 bp, Artificial sequence
  SiRNA target sequence
tatctgtgagtctcagtggac

SEQ ID NO: 299512 - DNA, 21 bp, Artificial sequence
  SiRNA target sequence
atctgtgagtctcagtggaca

SEQ ID NO: 299513 - DNA, 21 bp, Artificial sequence
  SiRNA target sequence
tctgtgagtctcagtggacat

SEQ ID NO: 299514 - DNA, 21 bp, Artificial sequence
  SiRNA target sequence
ctgtgagtctcagtggacatc

SEQ ID NO: 299515 - DNA, 21 bp, Artificial sequence
  SiRNA target sequence
tgtgagtctcagtggacatca

SEQ ID NO: 299516 - DNA, 21 bp, Artificial sequence
  SiRNA target sequence
gtgagtctcagtggacatcac

SEQ ID NO: 299517 - DNA, 21 bp, Artificial sequence
  SiRNA target sequence
tgagtctcagtggacatcaca

SEQ ID NO: 299518 - DNA, 21 bp, Artificial sequence
  SiRNA target sequence
gagtctcagtggacatcacag

SEQ ID NO: 299519 - DNA, 21 bp, Artificial sequence
  SiRNA target sequence
agtctcagtggacatcacagt

SEQ ID NO: 299520 - DNA, 21 bp, Artificial sequence
  SiRNA target sequence
gtctcagtggacatcacagta

SEQ ID NO: 299521 - DNA, 21 bp, Artificial sequence
  SiRNA target sequence
tctcagtggacatcacagtaa

SEQ ID NO: 299522 - DNA, 21 bp, Artificial sequence
  SiRNA target sequence
ctcagtggacatcacagtaag

SEQ ID NO: 299523 - DNA, 21 bp, Artificial sequence
  SiRNA target sequence
tcagtggacatcacagtaagg

SEQ ID NO: 299524 - DNA, 21 bp, Artificial sequence
  SiRNA target sequence
cagtggacatcacagtaaggt

SEQ ID NO: 299525 - DNA, 21 bp, Artificial sequence
  SiRNA target sequence
agtggacatcacagtaaggtc

SEQ ID NO: 299526 - DNA, 21 bp, Artificial sequence
  SiRNA target sequence
gtggacatcacagtaaggtcg

SEQ ID NO: 299527 - DNA, 21 bp, Artificial sequence
  SiRNA target sequence
tggacatcacagtaaggtcgc

SEQ ID NO: 299528 - DNA, 21 bp, Artificial sequence
  SiRNA target sequence
ggacatcacagtaaggtcgca

SEQ ID NO: 299529 - DNA, 21 bp, Artificial sequence
  SiRNA target sequence
gacatcacagtaaggtcgcag

SEQ ID NO: 299530 - DNA, 21 bp, Artificial sequence
  SiRNA target sequence
acatcacagtaaggtcgcagt

SEQ ID NO: 299531 - DNA, 21 bp, Artificial sequence
  SiRNA target sequence
catcacagtaaggtcgcagtt

SEQ ID NO: 299532 - DNA, 21 bp, Artificial sequence
  SiRNA target sequence
atcacagtaaggtcgcagtta

SEQ ID NO: 299533 - DNA, 21 bp, Artificial sequence
  SiRNA target sequence
tcacagtaaggtcgcagttaa

SEQ ID NO: 299534 - DNA, 21 bp, Artificial sequence
  SiRNA target sequence
cacagtaaggtcgcagttaac

SEQ ID NO: 299535 - DNA, 21 bp, Artificial sequence
  SiRNA target sequence
acagtaaggtcgcagttaact

SEQ ID NO: 299536 - DNA, 21 bp, Artificial sequence
  SiRNA target sequence
cagtaaggtcgcagttaactt

SEQ ID NO: 299537 - DNA, 21 bp, Artificial sequence
  SiRNA target sequence
agtaaggtcgcagttaacttg

SEQ ID NO: 299538 - DNA, 21 bp, Artificial sequence
  SiRNA target sequence
gtaaggtcgcagttaacttgt

SEQ ID NO: 299539 - DNA, 21 bp, Artificial sequence
  SiRNA target sequence
taaggtcgcagttaacttgta

SEQ ID NO: 299540 - DNA, 21 bp, Artificial sequence
  SiRNA target sequence
aaggtcgcagttaacttgtaa

SEQ ID NO: 299541 - DNA, 21 bp, Artificial sequence
  SiRNA target sequence
aggtcgcagttaacttgtaat

SEQ ID NO: 299542 - DNA, 21 bp, Artificial sequence
  SiRNA target sequence
ggtcgcagttaacttgtaatc

SEQ ID NO: 299543 - DNA, 21 bp, Artificial sequence
  SiRNA target sequence
gtcgcagttaacttgtaatct

SEQ ID NO: 299544 - DNA, 21 bp, Artificial sequence
  SiRNA target sequence
tcgcagttaacttgtaatctt

SEQ ID NO: 299545 - DNA, 21 bp, Artificial sequence
  SiRNA target sequence
cgcagttaacttgtaatcttt

SEQ ID NO: 299546 - DNA, 21 bp, Artificial sequence
  SiRNA target sequence
gcagttaacttgtaatctttt

SEQ ID NO: 299547 - DNA, 21 bp, Artificial sequence
  SiRNA target sequence
cagttaacttgtaatcttttc

SEQ ID NO: 299548 - DNA, 21 bp, Artificial sequence
  SiRNA target sequence
agttaacttgtaatcttttca

SEQ ID NO: 299549 - DNA, 21 bp, Artificial sequence
  SiRNA target sequence
gttaacttgtaatcttttcat

SEQ ID NO: 299550 - DNA, 21 bp, Artificial sequence
  SiRNA target sequence
ttaacttgtaatcttttcatt

SEQ ID NO: 299551 - DNA, 21 bp, Artificial sequence
  SiRNA target sequence
taacttgtaatcttttcattc

SEQ ID NO: 299552 - DNA, 21 bp, Artificial sequence
  SiRNA target sequence
aacttgtaatcttttcattcc

SEQ ID NO: 299553 - DNA, 21 bp, Artificial sequence
  SiRNA target sequence
acttgtaatcttttcattcct

SEQ ID NO: 299554 - DNA, 21 bp, Artificial sequence
  SiRNA target sequence
cttgtaatcttttcattcctg

SEQ ID NO: 299555 - DNA, 21 bp, Artificial sequence
  SiRNA target sequence
ttgtaatcttttcattcctgt

SEQ ID NO: 299556 - DNA, 21 bp, Artificial sequence
  SiRNA target sequence
tgtaatcttttcattcctgtg

SEQ ID NO: 299557 - DNA, 21 bp, Artificial sequence
  SiRNA target sequence
gtaatcttttcattcctgtgt

SEQ ID NO: 299558 - DNA, 21 bp, Artificial sequence
  SiRNA target sequence
taatcttttcattcctgtgtc

SEQ ID NO: 299559 - DNA, 21 bp, Artificial sequence
  SiRNA target sequence
aatcttttcattcctgtgtcg

SEQ ID NO: 299560 - DNA, 21 bp, Artificial sequence
  SiRNA target sequence
atcttttcattcctgtgtcgg

SEQ ID NO: 299561 - DNA, 21 bp, Artificial sequence
  SiRNA target sequence
tcttttcattcctgtgtcgga

SEQ ID NO: 299562 - DNA, 21 bp, Artificial sequence
  SiRNA target sequence
cttttcattcctgtgtcggag

SEQ ID NO: 299563 - DNA, 21 bp, Artificial sequence
  SiRNA target sequence
ttttcattcctgtgtcggagc

SEQ ID NO: 299564 - DNA, 21 bp, Artificial sequence
  SiRNA target sequence
tttcattcctgtgtcggagca

SEQ ID NO: 299565 - DNA, 21 bp, Artificial sequence
  SiRNA target sequence
ttcattcctgtgtcggagcag

SEQ ID NO: 299566 - DNA, 21 bp, Artificial sequence
  SiRNA target sequence
tcattcctgtgtcggagcagt

SEQ ID NO: 299567 - DNA, 21 bp, Artificial sequence
  SiRNA target sequence
cattcctgtgtcggagcagtg

SEQ ID NO: 299568 - DNA, 21 bp, Artificial sequence
  SiRNA target sequence
attcctgtgtcggagcagtgg

SEQ ID NO: 299569 - DNA, 21 bp, Artificial sequence
  SiRNA target sequence
ttcctgtgtcggagcagtggt

SEQ ID NO: 299570 - DNA, 21 bp, Artificial sequence
  SiRNA target sequence
tcctgtgtcggagcagtggta

SEQ ID NO: 299571 - DNA, 21 bp, Artificial sequence
  SiRNA target sequence
cctgtgtcggagcagtggtaa

SEQ ID NO: 299572 - DNA, 21 bp, Artificial sequence
  SiRNA target sequence
ctgtgtcggagcagtggtaat

SEQ ID NO: 299573 - DNA, 21 bp, Artificial sequence
  SiRNA target sequence
tgtgtcggagcagtggtaatg

SEQ ID NO: 299574 - DNA, 21 bp, Artificial sequence
  SiRNA target sequence
gtgtcggagcagtggtaatgg

SEQ ID NO: 299575 - DNA, 21 bp, Artificial sequence
  SiRNA target sequence
tgtcggagcagtggtaatgga

SEQ ID NO: 299576 - DNA, 21 bp, Artificial sequence
  SiRNA target sequence
gtcggagcagtggtaatggag

SEQ ID NO: 299577 - DNA, 21 bp, Artificial sequence
  SiRNA target sequence
tcggagcagtggtaatggagc

SEQ ID NO: 299578 - DNA, 21 bp, Artificial sequence
  SiRNA target sequence
cggagcagtggtaatggagcc

SEQ ID NO: 299579 - DNA, 21 bp, Artificial sequence
  SiRNA target sequence
ggagcagtggtaatggagccg

SEQ ID NO: 299580 - DNA, 21 bp, Artificial sequence
  SiRNA target sequence
gagcagtggtaatggagccgg

SEQ ID NO: 299581 - DNA, 21 bp, Artificial sequence
  SiRNA target sequence
agcagtggtaatggagccgga

SEQ ID NO: 299582 - DNA, 21 bp, Artificial sequence
  SiRNA target sequence
gcagtggtaatggagccggac

SEQ ID NO: 299583 - DNA, 21 bp, Artificial sequence
  SiRNA target sequence
cagtggtaatggagccggacg

SEQ ID NO: 299584 - DNA, 21 bp, Artificial sequence
  SiRNA target sequence
agtggtaatggagccggacga

SEQ ID NO: 299585 - DNA, 21 bp, Artificial sequence
  SiRNA target sequence
gtggtaatggagccggacgat

SEQ ID NO: 299586 - DNA, 21 bp, Artificial sequence
  SiRNA target sequence
tggtaatggagccggacgatt

SEQ ID NO: 299587 - DNA, 21 bp, Artificial sequence
  SiRNA target sequence
ggtaatggagccggacgattt

SEQ ID NO: 299588 - DNA, 21 bp, Artificial sequence
  SiRNA target sequence
gtaatggagccggacgatttc

SEQ ID NO: 299589 - DNA, 21 bp, Artificial sequence
  SiRNA target sequence
taatggagccggacgatttcg

SEQ ID NO: 299590 - DNA, 21 bp, Artificial sequence
  SiRNA target sequence
aatggagccggacgatttcgc

SEQ ID NO: 299591 - DNA, 21 bp, Artificial sequence
  SiRNA target sequence
atggagccggacgatttcgcc

SEQ ID NO: 299592 - DNA, 21 bp, Artificial sequence
  SiRNA target sequence
tggagccggacgatttcgcca

SEQ ID NO: 299593 - DNA, 21 bp, Artificial sequence
  SiRNA target sequence
ggagccggacgatttcgccaa

SEQ ID NO: 299594 - DNA, 21 bp, Artificial sequence
  SiRNA target sequence
gagccggacgatttcgccaaa

SEQ ID NO: 299595 - DNA, 21 bp, Artificial sequence
  SiRNA target sequence
agccggacgatttcgccaaaa

SEQ ID NO: 299596 - DNA, 21 bp, Artificial sequence
  SiRNA target sequence
gccggacgatttcgccaaaac

SEQ ID NO: 299597 - DNA, 21 bp, Artificial sequence
  SiRNA target sequence
ccggacgatttcgccaaaaca

SEQ ID NO: 299598 - DNA, 21 bp, Artificial sequence
  SiRNA target sequence
cggacgatttcgccaaaacat

SEQ ID NO: 299599 - DNA, 21 bp, Artificial sequence
  SiRNA target sequence
ggacgatttcgccaaaacatg

SEQ ID NO: 299600 - DNA, 21 bp, Artificial sequence
  SiRNA target sequence
gacgatttcgccaaaacatgt

SEQ ID NO: 299601 - DNA, 21 bp, Artificial sequence
  SiRNA target sequence
acgatttcgccaaaacatgtt

SEQ ID NO: 299602 - DNA, 21 bp, Artificial sequence
  SiRNA target sequence
cgatttcgccaaaacatgttt

SEQ ID NO: 299603 - DNA, 21 bp, Artificial sequence
  SiRNA target sequence
gatttcgccaaaacatgtttt

SEQ ID NO: 299604 - DNA, 21 bp, Artificial sequence
  SiRNA target sequence
atttcgccaaaacatgttttc

SEQ ID NO: 299605 - DNA, 21 bp, Artificial sequence
  SiRNA target sequence
tttcgccaaaacatgttttct

SEQ ID NO: 299606 - DNA, 21 bp, Artificial sequence
  SiRNA target sequence
ttcgccaaaacatgttttctt

SEQ ID NO: 299607 - DNA, 21 bp, Artificial sequence
  SiRNA target sequence
tcgccaaaacatgttttcttc

SEQ ID NO: 299608 - DNA, 21 bp, Artificial sequence
  SiRNA target sequence
cgccaaaacatgttttcttca

SEQ ID NO: 299609 - DNA, 21 bp, Artificial sequence
  SiRNA target sequence
gccaaaacatgttttcttcaa

SEQ ID NO: 299610 - DNA, 21 bp, Artificial sequence
  SiRNA target sequence
ccaaaacatgttttcttcaac

SEQ ID NO: 299611 - DNA, 21 bp, Artificial sequence
  SiRNA target sequence
caaaacatgttttcttcaact

SEQ ID NO: 299612 - DNA, 21 bp, Artificial sequence
  SiRNA target sequence
aaaacatgttttcttcaactc

SEQ ID NO: 299613 - DNA, 21 bp, Artificial sequence
  SiRNA target sequence
aaacatgttttcttcaactca

SEQ ID NO: 299614 - DNA, 21 bp, Artificial sequence
  SiRNA target sequence
aacatgttttcttcaactcaa

SEQ ID NO: 299615 - DNA, 21 bp, Artificial sequence
  SiRNA target sequence
acatgttttcttcaactcaac

SEQ ID NO: 299616 - DNA, 21 bp, Artificial sequence
  SiRNA target sequence
catgttttcttcaactcaaca

SEQ ID NO: 299617 - DNA, 21 bp, Artificial sequence
  SiRNA target sequence
atgttttcttcaactcaacaa

SEQ ID NO: 299618 - DNA, 21 bp, Artificial sequence
  SiRNA target sequence
tgttttcttcaactcaacaaa

SEQ ID NO: 299619 - DNA, 21 bp, Artificial sequence
  SiRNA target sequence
gttttcttcaactcaacaaaa

SEQ ID NO: 299620 - DNA, 21 bp, Artificial sequence
  SiRNA target sequence
ttttcttcaactcaacaaaat

SEQ ID NO: 299621 - DNA, 21 bp, Artificial sequence
  SiRNA target sequence
tttcttcaactcaacaaaata

SEQ ID NO: 299622 - DNA, 21 bp, Artificial sequence
  SiRNA target sequence
ttcttcaactcaacaaaataa

SEQ ID NO: 299623 - DNA, 21 bp, Artificial sequence
  SiRNA target sequence
tcttcaactcaacaaaataac

SEQ ID NO: 299624 - DNA, 21 bp, Artificial sequence
  SiRNA target sequence
cttcaactcaacaaaataaca

SEQ ID NO: 299625 - DNA, 21 bp, Artificial sequence
  SiRNA target sequence
ttcaactcaacaaaataacaa

SEQ ID NO: 299626 - DNA, 21 bp, Artificial sequence
  SiRNA target sequence
tcaactcaacaaaataacaag

SEQ ID NO: 299627 - DNA, 21 bp, Artificial sequence
  SiRNA target sequence
caactcaacaaaataacaaga

SEQ ID NO: 299628 - DNA, 21 bp, Artificial sequence
  SiRNA target sequence
aactcaacaaaataacaagat

SEQ ID NO: 299629 - DNA, 21 bp, Artificial sequence
  SiRNA target sequence
actcaacaaaataacaagatg

SEQ ID NO: 299630 - DNA, 21 bp, Artificial sequence
  SiRNA target sequence
ctcaacaaaataacaagatga

SEQ ID NO: 299631 - DNA, 21 bp, Artificial sequence
  SiRNA target sequence
tcaacaaaataacaagatgac

SEQ ID NO: 299632 - DNA, 21 bp, Artificial sequence
  SiRNA target sequence
caacaaaataacaagatgaca

SEQ ID NO: 299633 - DNA, 21 bp, Artificial sequence
  SiRNA target sequence
aacaaaataacaagatgacaa

SEQ ID NO: 299634 - DNA, 21 bp, Artificial sequence
  SiRNA target sequence
acaaaataacaagatgacaaa

SEQ ID NO: 299635 - DNA, 21 bp, Artificial sequence
  SiRNA target sequence
caaaataacaagatgacaaaa

SEQ ID NO: 299636 - DNA, 21 bp, Artificial sequence
  SiRNA target sequence
aaaataacaagatgacaaaac

SEQ ID NO: 299637 - DNA, 21 bp, Artificial sequence
  SiRNA target sequence
aaataacaagatgacaaaaca

SEQ ID NO: 299638 - DNA, 21 bp, Artificial sequence
  SiRNA target sequence
aataacaagatgacaaaacaa

SEQ ID NO: 299639 - DNA, 21 bp, Artificial sequence
  SiRNA target sequence
ataacaagatgacaaaacaac

SEQ ID NO: 299640 - DNA, 21 bp, Artificial sequence
  SiRNA target sequence
taacaagatgacaaaacaacc

SEQ ID NO: 299641 - DNA, 21 bp, Artificial sequence
  SiRNA target sequence
aacaagatgacaaaacaacca

SEQ ID NO: 299642 - DNA, 21 bp, Artificial sequence
  SiRNA target sequence
acaagatgacaaaacaaccag

SEQ ID NO: 299643 - DNA, 21 bp, Artificial sequence
  SiRNA target sequence
caagatgacaaaacaaccagc

SEQ ID NO: 299644 - DNA, 21 bp, Artificial sequence
  SiRNA target sequence
aagatgacaaaacaaccagca

SEQ ID NO: 299645 - DNA, 21 bp, Artificial sequence
  SiRNA target sequence
agatgacaaaacaaccagcaa

SEQ ID NO: 299646 - DNA, 21 bp, Artificial sequence
  SiRNA target sequence
gatgacaaaacaaccagcaac

SEQ ID NO: 299647 - DNA, 21 bp, Artificial sequence
  SiRNA target sequence
atgacaaaacaaccagcaact

SEQ ID NO: 299648 - DNA, 21 bp, Artificial sequence
  SiRNA target sequence
tgacaaaacaaccagcaactt

SEQ ID NO: 299649 - DNA, 21 bp, Artificial sequence
  SiRNA target sequence
gacaaaacaaccagcaacttt

SEQ ID NO: 299650 - DNA, 21 bp, Artificial sequence
  SiRNA target sequence
acaaaacaaccagcaacttta

SEQ ID NO: 299651 - DNA, 21 bp, Artificial sequence
  SiRNA target sequence
caaaacaaccagcaactttaa

SEQ ID NO: 299652 - DNA, 21 bp, Artificial sequence
  SiRNA target sequence
aaaacaaccagcaactttaac

SEQ ID NO: 299653 - DNA, 21 bp, Artificial sequence
  SiRNA target sequence
aaacaaccagcaactttaacc

SEQ ID NO: 299654 - DNA, 21 bp, Artificial sequence
  SiRNA target sequence
aacaaccagcaactttaacct

SEQ ID NO: 299655 - DNA, 21 bp, Artificial sequence
  SiRNA target sequence
acaaccagcaactttaaccta

SEQ ID NO: 299656 - DNA, 21 bp, Artificial sequence
  SiRNA target sequence
caaccagcaactttaacctat

SEQ ID NO: 299657 - DNA, 21 bp, Artificial sequence
  SiRNA target sequence
aaccagcaactttaacctatc

SEQ ID NO: 299658 - DNA, 21 bp, Artificial sequence
  SiRNA target sequence
accagcaactttaacctatct

SEQ ID NO: 299659 - DNA, 21 bp, Artificial sequence
  SiRNA target sequence
ccagcaactttaacctatctt

SEQ ID NO: 299660 - DNA, 21 bp, Artificial sequence
  SiRNA target sequence
cagcaactttaacctatcttt

SEQ ID NO: 299661 - DNA, 21 bp, Artificial sequence
  SiRNA target sequence
agcaactttaacctatctttc

SEQ ID NO: 299662 - DNA, 21 bp, Artificial sequence
  SiRNA target sequence
gcaactttaacctatctttca

SEQ ID NO: 299663 - DNA, 21 bp, Artificial sequence
  SiRNA target sequence
caactttaacctatctttcaa

SEQ ID NO: 299664 - DNA, 21 bp, Artificial sequence
  SiRNA target sequence
aactttaacctatctttcaag

SEQ ID NO: 299665 - DNA, 21 bp, Artificial sequence
  SiRNA target sequence
actttaacctatctttcaagt

SEQ ID NO: 299666 - DNA, 21 bp, Artificial sequence
  SiRNA target sequence
ctttaacctatctttcaagta

SEQ ID NO: 299667 - DNA, 21 bp, Artificial sequence
  SiRNA target sequence
tttaacctatctttcaagtat

SEQ ID NO: 299668 - DNA, 21 bp, Artificial sequence
  SiRNA target sequence
ttaacctatctttcaagtatg

SEQ ID NO: 299669 - DNA, 21 bp, Artificial sequence
  SiRNA target sequence
taacctatctttcaagtatga

SEQ ID NO: 299670 - DNA, 21 bp, Artificial sequence
  SiRNA target sequence
aacctatctttcaagtatgaa

SEQ ID NO: 299671 - DNA, 21 bp, Artificial sequence
  SiRNA target sequence
acctatctttcaagtatgaag

SEQ ID NO: 299672 - DNA, 21 bp, Artificial sequence
  SiRNA target sequence
cctatctttcaagtatgaagg

SEQ ID NO: 299673 - DNA, 21 bp, Artificial sequence
  SiRNA target sequence
ctatctttcaagtatgaaggt

SEQ ID NO: 299674 - DNA, 21 bp, Artificial sequence
  SiRNA target sequence
tatctttcaagtatgaaggtg

SEQ ID NO: 299675 - DNA, 21 bp, Artificial sequence
  SiRNA target sequence
atctttcaagtatgaaggtga

SEQ ID NO: 299676 - DNA, 21 bp, Artificial sequence
  SiRNA target sequence
tctttcaagtatgaaggtgat

SEQ ID NO: 299677 - DNA, 21 bp, Artificial sequence
  SiRNA target sequence
ctttcaagtatgaaggtgatt

SEQ ID NO: 299678 - DNA, 21 bp, Artificial sequence
  SiRNA target sequence
tttcaagtatgaaggtgatta

SEQ ID NO: 299679 - DNA, 21 bp, Artificial sequence
  SiRNA target sequence
ttcaagtatgaaggtgattag

SEQ ID NO: 299680 - DNA, 21 bp, Artificial sequence
  SiRNA target sequence
tcaagtatgaaggtgattagt

SEQ ID NO: 299681 - DNA, 21 bp, Artificial sequence
  SiRNA target sequence
caagtatgaaggtgattagta

SEQ ID NO: 299682 - DNA, 21 bp, Artificial sequence
  SiRNA target sequence
aagtatgaaggtgattagtat

SEQ ID NO: 299683 - DNA, 21 bp, Artificial sequence
  SiRNA target sequence
agtatgaaggtgattagtatg

SEQ ID NO: 299684 - DNA, 21 bp, Artificial sequence
  SiRNA target sequence
gtatgaaggtgattagtatgc

SEQ ID NO: 299685 - DNA, 21 bp, Artificial sequence
  SiRNA target sequence
tatgaaggtgattagtatgcc

SEQ ID NO: 299686 - DNA, 21 bp, Artificial sequence
  SiRNA target sequence
atgaaggtgattagtatgcca

SEQ ID NO: 299687 - DNA, 21 bp, Artificial sequence
  SiRNA target sequence
tgaaggtgattagtatgccac

SEQ ID NO: 299688 - DNA, 21 bp, Artificial sequence
  SiRNA target sequence
gaaggtgattagtatgccacc

SEQ ID NO: 299689 - DNA, 21 bp, Artificial sequence
  SiRNA target sequence
aaggtgattagtatgccacca

SEQ ID NO: 299690 - DNA, 21 bp, Artificial sequence
  SiRNA target sequence
aggtgattagtatgccaccaa

SEQ ID NO: 299691 - DNA, 21 bp, Artificial sequence
  SiRNA target sequence
ggtgattagtatgccaccaag

SEQ ID NO: 299692 - DNA, 21 bp, Artificial sequence
  SiRNA target sequence
gtgattagtatgccaccaagt

SEQ ID NO: 299693 - DNA, 21 bp, Artificial sequence
  SiRNA target sequence
tgattagtatgccaccaagtg

SEQ ID NO: 299694 - DNA, 21 bp, Artificial sequence
  SiRNA target sequence
gattagtatgccaccaagtga

SEQ ID NO: 299695 - DNA, 21 bp, Artificial sequence
  SiRNA target sequence
attagtatgccaccaagtgaa

SEQ ID NO: 299696 - DNA, 21 bp, Artificial sequence
  SiRNA target sequence
ttagtatgccaccaagtgaat

SEQ ID NO: 299697 - DNA, 21 bp, Artificial sequence
  SiRNA target sequence
tagtatgccaccaagtgaatt

SEQ ID NO: 299698 - DNA, 21 bp, Artificial sequence
  SiRNA target sequence
agtatgccaccaagtgaattc

SEQ ID NO: 299699 - DNA, 21 bp, Artificial sequence
  SiRNA target sequence
gtatgccaccaagtgaattct

SEQ ID NO: 299700 - DNA, 21 bp, Artificial sequence
  SiRNA target sequence
tatgccaccaagtgaattctt

SEQ ID NO: 299701 - DNA, 21 bp, Artificial sequence
  SiRNA target sequence
atgccaccaagtgaattcttt

SEQ ID NO: 299702 - DNA, 21 bp, Artificial sequence
  SiRNA target sequence
tgccaccaagtgaattctttt

SEQ ID NO: 299703 - DNA, 21 bp, Artificial sequence
  SiRNA target sequence
gccaccaagtgaattcttttc

SEQ ID NO: 299704 - DNA, 21 bp, Artificial sequence
  SiRNA target sequence
ccaccaagtgaattcttttca

SEQ ID NO: 299705 - DNA, 21 bp, Artificial sequence
  SiRNA target sequence
caccaagtgaattcttttcac

SEQ ID NO: 299706 - DNA, 21 bp, Artificial sequence
  SiRNA target sequence
accaagtgaattcttttcact

SEQ ID NO: 299707 - DNA, 21 bp, Artificial sequence
  SiRNA target sequence
ccaagtgaattcttttcactt

SEQ ID NO: 299708 - DNA, 21 bp, Artificial sequence
  SiRNA target sequence
caagtgaattcttttcacttg

SEQ ID NO: 299709 - DNA, 21 bp, Artificial sequence
  SiRNA target sequence
aagtgaattcttttcacttga

SEQ ID NO: 299710 - DNA, 21 bp, Artificial sequence
  SiRNA target sequence
agtgaattcttttcacttgat

SEQ ID NO: 299711 - DNA, 21 bp, Artificial sequence
  SiRNA target sequence
gtgaattcttttcacttgatg

SEQ ID NO: 299712 - DNA, 21 bp, Artificial sequence
  SiRNA target sequence
tgaattcttttcacttgatga

SEQ ID NO: 299713 - DNA, 21 bp, Artificial sequence
  SiRNA target sequence
gaattcttttcacttgatgac

SEQ ID NO: 299714 - DNA, 21 bp, Artificial sequence
  SiRNA target sequence
aattcttttcacttgatgact

SEQ ID NO: 299715 - DNA, 21 bp, Artificial sequence
  SiRNA target sequence
attcttttcacttgatgactt

SEQ ID NO: 299716 - DNA, 21 bp, Artificial sequence
  SiRNA target sequence
ttcttttcacttgatgacttg

SEQ ID NO: 299717 - DNA, 21 bp, Artificial sequence
  SiRNA target sequence
tcttttcacttgatgacttgt

SEQ ID NO: 299718 - DNA, 21 bp, Artificial sequence
  SiRNA target sequence
cttttcacttgatgacttgtg

SEQ ID NO: 299719 - DNA, 21 bp, Artificial sequence
  SiRNA target sequence
ttttcacttgatgacttgtgt

SEQ ID NO: 299720 - DNA, 21 bp, Artificial sequence
  SiRNA target sequence
tttcacttgatgacttgtgtc

SEQ ID NO: 299721 - DNA, 21 bp, Artificial sequence
  SiRNA target sequence
ttcacttgatgacttgtgtcg

SEQ ID NO: 299722 - DNA, 21 bp, Artificial sequence
  SiRNA target sequence
tcacttgatgacttgtgtcgc

SEQ ID NO: 299723 - DNA, 21 bp, Artificial sequence
  SiRNA target sequence
cacttgatgacttgtgtcgcc

SEQ ID NO: 299724 - DNA, 21 bp, Artificial sequence
  SiRNA target sequence
acttgatgacttgtgtcgcca

SEQ ID NO: 299725 - DNA, 21 bp, Artificial sequence
  SiRNA target sequence
cttgatgacttgtgtcgccaa

SEQ ID NO: 299726 - DNA, 21 bp, Artificial sequence
  SiRNA target sequence
ttgatgacttgtgtcgccaac

SEQ ID NO: 299727 - DNA, 21 bp, Artificial sequence
  SiRNA target sequence
tgatgacttgtgtcgccaaca

SEQ ID NO: 299728 - DNA, 21 bp, Artificial sequence
  SiRNA target sequence
gatgacttgtgtcgccaacaa

SEQ ID NO: 299729 - DNA, 21 bp, Artificial sequence
  SiRNA target sequence
atgacttgtgtcgccaacaaa

SEQ ID NO: 299730 - DNA, 21 bp, Artificial sequence
  SiRNA target sequence
tgacttgtgtcgccaacaaat

SEQ ID NO: 299731 - DNA, 21 bp, Artificial sequence
  SiRNA target sequence
gacttgtgtcgccaacaaatt

SEQ ID NO: 299732 - DNA, 21 bp, Artificial sequence
  SiRNA target sequence
acttgtgtcgccaacaaattt

SEQ ID NO: 299733 - DNA, 21 bp, Artificial sequence
  SiRNA target sequence
cttgtgtcgccaacaaatttt

SEQ ID NO: 299734 - DNA, 21 bp, Artificial sequence
  SiRNA target sequence
ttgtgtcgccaacaaatttta

SEQ ID NO: 299735 - DNA, 21 bp, Artificial sequence
  SiRNA target sequence
tgtgtcgccaacaaattttaa

SEQ ID NO: 299736 - DNA, 21 bp, Artificial sequence
  SiRNA target sequence
gtgtcgccaacaaattttaaa

SEQ ID NO: 299737 - DNA, 21 bp, Artificial sequence
  SiRNA target sequence
tgtcgccaacaaattttaaag

SEQ ID NO: 299738 - DNA, 21 bp, Artificial sequence
  SiRNA target sequence
gtcgccaacaaattttaaaga

SEQ ID NO: 299739 - DNA, 21 bp, Artificial sequence
  SiRNA target sequence
tcgccaacaaattttaaagat

SEQ ID NO: 299740 - DNA, 21 bp, Artificial sequence
  SiRNA target sequence
cgccaacaaattttaaagatg

SEQ ID NO: 299741 - DNA, 21 bp, Artificial sequence
  SiRNA target sequence
gccaacaaattttaaagatgg

SEQ ID NO: 299742 - DNA, 21 bp, Artificial sequence
  SiRNA target sequence
ccaacaaattttaaagatggt

SEQ ID NO: 299743 - DNA, 21 bp, Artificial sequence
  SiRNA target sequence
caacaaattttaaagatggtt

SEQ ID NO: 299744 - DNA, 21 bp, Artificial sequence
  SiRNA target sequence
aacaaattttaaagatggttt

SEQ ID NO: 299745 - DNA, 21 bp, Artificial sequence
  SiRNA target sequence
acaaattttaaagatggttta

SEQ ID NO: 299746 - DNA, 21 bp, Artificial sequence
  SiRNA target sequence
caaattttaaagatggtttat

SEQ ID NO: 299747 - DNA, 21 bp, Artificial sequence
  SiRNA target sequence
aaattttaaagatggtttata

SEQ ID NO: 299748 - DNA, 21 bp, Artificial sequence
  SiRNA target sequence
aattttaaagatggtttatat

SEQ ID NO: 299749 - DNA, 21 bp, Artificial sequence
  SiRNA target sequence
attttaaagatggtttatatt

SEQ ID NO: 299750 - DNA, 21 bp, Artificial sequence
  SiRNA target sequence
ttttaaagatggtttatattg

SEQ ID NO: 299751 - DNA, 21 bp, Artificial sequence
  SiRNA target sequence
tttaaagatggtttatattga

SEQ ID NO: 299752 - DNA, 21 bp, Artificial sequence
  SiRNA target sequence
ttaaagatggtttatattgac

SEQ ID NO: 299753 - DNA, 21 bp, Artificial sequence
  SiRNA target sequence
taaagatggtttatattgacc

SEQ ID NO: 299754 - DNA, 21 bp, Artificial sequence
  SiRNA target sequence
aaagatggtttatattgacca

SEQ ID NO: 299755 - DNA, 21 bp, Artificial sequence
  SiRNA target sequence
aagatggtttatattgaccaa

SEQ ID NO: 299756 - DNA, 21 bp, Artificial sequence
  SiRNA target sequence
agatggtttatattgaccaat

SEQ ID NO: 299757 - DNA, 21 bp, Artificial sequence
  SiRNA target sequence
gatggtttatattgaccaata

SEQ ID NO: 299758 - DNA, 21 bp, Artificial sequence
  SiRNA target sequence
atggtttatattgaccaatac

SEQ ID NO: 299759 - DNA, 21 bp, Artificial sequence
  SiRNA target sequence
tggtttatattgaccaatacg

SEQ ID NO: 299760 - DNA, 21 bp, Artificial sequence
  SiRNA target sequence
ggtttatattgaccaatacgc

SEQ ID NO: 299761 - DNA, 21 bp, Artificial sequence
  SiRNA target sequence
gtttatattgaccaatacgct

SEQ ID NO: 299762 - DNA, 21 bp, Artificial sequence
  SiRNA target sequence
tttatattgaccaatacgctt

SEQ ID NO: 299763 - DNA, 21 bp, Artificial sequence
  SiRNA target sequence
ttatattgaccaatacgcttt

SEQ ID NO: 299764 - DNA, 21 bp, Artificial sequence
  SiRNA target sequence
tatattgaccaatacgctttt

SEQ ID NO: 299765 - DNA, 21 bp, Artificial sequence
  SiRNA target sequence
atattgaccaatacgcttttc

SEQ ID NO: 299766 - DNA, 21 bp, Artificial sequence
  SiRNA target sequence
tattgaccaatacgcttttca

SEQ ID NO: 299767 - DNA, 21 bp, Artificial sequence
  SiRNA target sequence
attgaccaatacgcttttcac

SEQ ID NO: 299768 - DNA, 21 bp, Artificial sequence
  SiRNA target sequence
ttgaccaatacgcttttcaca

SEQ ID NO: 299769 - DNA, 21 bp, Artificial sequence
  SiRNA target sequence
tgaccaatacgcttttcacat

SEQ ID NO: 299770 - DNA, 21 bp, Artificial sequence
  SiRNA target sequence
gaccaatacgcttttcacatg

SEQ ID NO: 299771 - DNA, 21 bp, Artificial sequence
  SiRNA target sequence
accaatacgcttttcacatgt

SEQ ID NO: 299772 - DNA, 21 bp, Artificial sequence
  SiRNA target sequence
ccaatacgcttttcacatgtt

SEQ ID NO: 299773 - DNA, 21 bp, Artificial sequence
  SiRNA target sequence
caatacgcttttcacatgtta

SEQ ID NO: 299774 - DNA, 21 bp, Artificial sequence
  SiRNA target sequence
aatacgcttttcacatgttac

SEQ ID NO: 299775 - DNA, 21 bp, Artificial sequence
  SiRNA target sequence
atacgcttttcacatgttaca

SEQ ID NO: 299776 - DNA, 21 bp, Artificial sequence
  SiRNA target sequence
tacgcttttcacatgttacat

SEQ ID NO: 299777 - DNA, 21 bp, Artificial sequence
  SiRNA target sequence
acgcttttcacatgttacatg

SEQ ID NO: 299778 - DNA, 21 bp, Artificial sequence
  SiRNA target sequence
cgcttttcacatgttacatga

SEQ ID NO: 299779 - DNA, 21 bp, Artificial sequence
  SiRNA target sequence
gcttttcacatgttacatgaa

SEQ ID NO: 299780 - DNA, 21 bp, Artificial sequence
  SiRNA target sequence
cttttcacatgttacatgaag

SEQ ID NO: 299781 - DNA, 21 bp, Artificial sequence
  SiRNA target sequence
ttttcacatgttacatgaaga

SEQ ID NO: 299782 - DNA, 21 bp, Artificial sequence
  SiRNA target sequence
tttcacatgttacatgaagac

SEQ ID NO: 299783 - DNA, 21 bp, Artificial sequence
  SiRNA target sequence
ttcacatgttacatgaagaca

SEQ ID NO: 299784 - DNA, 21 bp, Artificial sequence
  SiRNA target sequence
tcacatgttacatgaagacat

SEQ ID NO: 299785 - DNA, 21 bp, Artificial sequence
  SiRNA target sequence
cacatgttacatgaagacata

SEQ ID NO: 299786 - DNA, 21 bp, Artificial sequence
  SiRNA target sequence
acatgttacatgaagacataa

SEQ ID NO: 299787 - DNA, 21 bp, Artificial sequence
  SiRNA target sequence
catgttacatgaagacataaa

SEQ ID NO: 299788 - DNA, 21 bp, Artificial sequence
  SiRNA target sequence
atgttacatgaagacataaat

SEQ ID NO: 299789 - DNA, 21 bp, Artificial sequence
  SiRNA target sequence
tgttacatgaagacataaatt

SEQ ID NO: 299790 - DNA, 21 bp, Artificial sequence
  SiRNA target sequence
gttacatgaagacataaattg

SEQ ID NO: 299791 - DNA, 21 bp, Artificial sequence
  SiRNA target sequence
ttacatgaagacataaattgt

SEQ ID NO: 299792 - DNA, 21 bp, Artificial sequence
  SiRNA target sequence
tacatgaagacataaattgta

SEQ ID NO: 299793 - DNA, 21 bp, Artificial sequence
  SiRNA target sequence
acatgaagacataaattgtat

SEQ ID NO: 299794 - DNA, 21 bp, Artificial sequence
  SiRNA target sequence
catgaagacataaattgtata

SEQ ID NO: 299795 - DNA, 21 bp, Artificial sequence
  SiRNA target sequence
atgaagacataaattgtatag

SEQ ID NO: 299796 - DNA, 21 bp, Artificial sequence
  SiRNA target sequence
tgaagacataaattgtatagg

SEQ ID NO: 299797 - DNA, 21 bp, Artificial sequence
  SiRNA target sequence
gaagacataaattgtataggg

SEQ ID NO: 299798 - DNA, 21 bp, Artificial sequence
  SiRNA target sequence
aagacataaattgtatagggt

SEQ ID NO: 299799 - DNA, 21 bp, Artificial sequence
  SiRNA target sequence
agacataaattgtatagggtt

SEQ ID NO: 299800 - DNA, 21 bp, Artificial sequence
  SiRNA target sequence
gacataaattgtatagggttt

SEQ ID NO: 299801 - DNA, 21 bp, Artificial sequence
  SiRNA target sequence
acataaattgtatagggttta

SEQ ID NO: 299802 - DNA, 21 bp, Artificial sequence
  SiRNA target sequence
cataaattgtatagggtttac

SEQ ID NO: 299803 - DNA, 21 bp, Artificial sequence
  SiRNA target sequence
ataaattgtatagggtttact

SEQ ID NO: 299804 - DNA, 21 bp, Artificial sequence
  SiRNA target sequence
taaattgtatagggtttactc

SEQ ID NO: 299805 - DNA, 21 bp, Artificial sequence
  SiRNA target sequence
aaattgtatagggtttactct

SEQ ID NO: 299806 - DNA, 21 bp, Artificial sequence
  SiRNA target sequence
aattgtatagggtttactcta

SEQ ID NO: 299807 - DNA, 21 bp, Artificial sequence
  SiRNA target sequence
attgtatagggtttactctat

SEQ ID NO: 299808 - DNA, 21 bp, Artificial sequence
  SiRNA target sequence
ttgtatagggtttactctatc

SEQ ID NO: 299809 - DNA, 21 bp, Artificial sequence
  SiRNA target sequence
tgtatagggtttactctatca

SEQ ID NO: 299810 - DNA, 21 bp, Artificial sequence
  SiRNA target sequence
gtatagggtttactctatcaa

SEQ ID NO: 299811 - DNA, 21 bp, Artificial sequence
  SiRNA target sequence
tatagggtttactctatcaat

SEQ ID NO: 299812 - DNA, 21 bp, Artificial sequence
  SiRNA target sequence
atagggtttactctatcaatt

SEQ ID NO: 299813 - DNA, 21 bp, Artificial sequence
  SiRNA target sequence
tagggtttactctatcaattt

SEQ ID NO: 299814 - DNA, 21 bp, Artificial sequence
  SiRNA target sequence
agggtttactctatcaattta

SEQ ID NO: 299815 - DNA, 21 bp, Artificial sequence
  SiRNA target sequence
gggtttactctatcaatttat

SEQ ID NO: 299816 - DNA, 21 bp, Artificial sequence
  SiRNA target sequence
ggtttactctatcaatttatg

SEQ ID NO: 299817 - DNA, 21 bp, Artificial sequence
  SiRNA target sequence
gtttactctatcaatttatga

SEQ ID NO: 299818 - DNA, 21 bp, Artificial sequence
  SiRNA target sequence
tttactctatcaatttatgat

SEQ ID NO: 299819 - DNA, 21 bp, Artificial sequence
  SiRNA target sequence
ttactctatcaatttatgatg

SEQ ID NO: 299820 - DNA, 21 bp, Artificial sequence
  SiRNA target sequence
tactctatcaatttatgatga

SEQ ID NO: 299821 - DNA, 21 bp, Artificial sequence
  SiRNA target sequence
actctatcaatttatgatgaa

SEQ ID NO: 299822 - DNA, 21 bp, Artificial sequence
  SiRNA target sequence
ctctatcaatttatgatgaag

SEQ ID NO: 299823 - DNA, 21 bp, Artificial sequence
  SiRNA target sequence
tctatcaatttatgatgaaga

SEQ ID NO: 299824 - DNA, 21 bp, Artificial sequence
  SiRNA target sequence
ctatcaatttatgatgaagat

SEQ ID NO: 299825 - DNA, 21 bp, Artificial sequence
  SiRNA target sequence
tatcaatttatgatgaagata

SEQ ID NO: 299826 - DNA, 21 bp, Artificial sequence
  SiRNA target sequence
atcaatttatgatgaagataa

SEQ ID NO: 299827 - DNA, 21 bp, Artificial sequence
  SiRNA target sequence
tcaatttatgatgaagataaa

SEQ ID NO: 299828 - DNA, 21 bp, Artificial sequence
  SiRNA target sequence
caatttatgatgaagataaac

SEQ ID NO: 299829 - DNA, 21 bp, Artificial sequence
  SiRNA target sequence
aatttatgatgaagataaacg

SEQ ID NO: 299830 - DNA, 21 bp, Artificial sequence
  SiRNA target sequence
atttatgatgaagataaacga

SEQ ID NO: 299831 - DNA, 21 bp, Artificial sequence
  SiRNA target sequence
tttatgatgaagataaacgaa

SEQ ID NO: 299832 - DNA, 21 bp, Artificial sequence
  SiRNA target sequence
ttatgatgaagataaacgaat

SEQ ID NO: 299833 - DNA, 21 bp, Artificial sequence
  SiRNA target sequence
tatgatgaagataaacgaatg

SEQ ID NO: 299834 - DNA, 21 bp, Artificial sequence
  SiRNA target sequence
atgatgaagataaacgaatga

SEQ ID NO: 299835 - DNA, 21 bp, Artificial sequence
  SiRNA target sequence
tgatgaagataaacgaatgaa

SEQ ID NO: 299836 - DNA, 21 bp, Artificial sequence
  SiRNA target sequence
gatgaagataaacgaatgaag

SEQ ID NO: 299837 - DNA, 21 bp, Artificial sequence
  SiRNA target sequence
atgaagataaacgaatgaagg

SEQ ID NO: 299838 - DNA, 21 bp, Artificial sequence
  SiRNA target sequence
tgaagataaacgaatgaagga

SEQ ID NO: 299839 - DNA, 21 bp, Artificial sequence
  SiRNA target sequence
gaagataaacgaatgaaggac

SEQ ID NO: 299840 - DNA, 21 bp, Artificial sequence
  SiRNA target sequence
aagataaacgaatgaaggaca

SEQ ID NO: 299841 - DNA, 21 bp, Artificial sequence
  SiRNA target sequence
agataaacgaatgaaggacat

SEQ ID NO: 299842 - DNA, 21 bp, Artificial sequence
  SiRNA target sequence
gataaacgaatgaaggacata

SEQ ID NO: 299843 - DNA, 21 bp, Artificial sequence
  SiRNA target sequence
ataaacgaatgaaggacataa

SEQ ID NO: 299844 - DNA, 21 bp, Artificial sequence
  SiRNA target sequence
taaacgaatgaaggacataac

SEQ ID NO: 299845 - DNA, 21 bp, Artificial sequence
  SiRNA target sequence
aaacgaatgaaggacataact

SEQ ID NO: 299846 - DNA, 21 bp, Artificial sequence
  SiRNA target sequence
aacgaatgaaggacataactt

SEQ ID NO: 299847 - DNA, 21 bp, Artificial sequence
  SiRNA target sequence
acgaatgaaggacataactta

SEQ ID NO: 299848 - DNA, 21 bp, Artificial sequence
  SiRNA target sequence
cgaatgaaggacataacttat

SEQ ID NO: 299849 - DNA, 21 bp, Artificial sequence
  SiRNA target sequence
gaatgaaggacataacttatt

SEQ ID NO: 299850 - DNA, 21 bp, Artificial sequence
  SiRNA target sequence
aatgaaggacataacttattg

SEQ ID NO: 299851 - DNA, 21 bp, Artificial sequence
  SiRNA target sequence
atgaaggacataacttattgg

SEQ ID NO: 299852 - DNA, 21 bp, Artificial sequence
  SiRNA target sequence
tgaaggacataacttattggg

SEQ ID NO: 299853 - DNA, 21 bp, Artificial sequence
  SiRNA target sequence
gaaggacataacttattggga

SEQ ID NO: 299854 - DNA, 21 bp, Artificial sequence
  SiRNA target sequence
aaggacataacttattgggat

SEQ ID NO: 299855 - DNA, 21 bp, Artificial sequence
  SiRNA target sequence
aggacataacttattgggatc

SEQ ID NO: 299856 - DNA, 21 bp, Artificial sequence
  SiRNA target sequence
ggacataacttattgggatct

SEQ ID NO: 299857 - DNA, 21 bp, Artificial sequence
  SiRNA target sequence
gacataacttattgggatctg

SEQ ID NO: 299858 - DNA, 21 bp, Artificial sequence
  SiRNA target sequence
acataacttattgggatctga

SEQ ID NO: 299859 - DNA, 21 bp, Artificial sequence
  SiRNA target sequence
cataacttattgggatctgaa

SEQ ID NO: 299860 - DNA, 21 bp, Artificial sequence
  SiRNA target sequence
ataacttattgggatctgaat

SEQ ID NO: 299861 - DNA, 21 bp, Artificial sequence
  SiRNA target sequence
taacttattgggatctgaatt

SEQ ID NO: 299862 - DNA, 21 bp, Artificial sequence
  SiRNA target sequence
aacttattgggatctgaattg

SEQ ID NO: 299863 - DNA, 21 bp, Artificial sequence
  SiRNA target sequence
acttattgggatctgaattgt

SEQ ID NO: 299864 - DNA, 21 bp, Artificial sequence
  SiRNA target sequence
cttattgggatctgaattgtg

SEQ ID NO: 299865 - DNA, 21 bp, Artificial sequence
  SiRNA target sequence
ttattgggatctgaattgtga

SEQ ID NO: 299866 - DNA, 21 bp, Artificial sequence
  SiRNA target sequence
tattgggatctgaattgtgaa

SEQ ID NO: 299867 - DNA, 21 bp, Artificial sequence
  SiRNA target sequence
attgggatctgaattgtgaat

SEQ ID NO: 299868 - DNA, 21 bp, Artificial sequence
  SiRNA target sequence
ttgggatctgaattgtgaata

SEQ ID NO: 299869 - DNA, 21 bp, Artificial sequence
  SiRNA target sequence
tgggatctgaattgtgaatat

SEQ ID NO: 299870 - DNA, 21 bp, Artificial sequence
  SiRNA target sequence
gggatctgaattgtgaatatc

SEQ ID NO: 299871 - DNA, 21 bp, Artificial sequence
  SiRNA target sequence
ggatctgaattgtgaatatca

SEQ ID NO: 299872 - DNA, 21 bp, Artificial sequence
  SiRNA target sequence
gatctgaattgtgaatatcat

SEQ ID NO: 299873 - DNA, 21 bp, Artificial sequence
  SiRNA target sequence
atctgaattgtgaatatcatg

SEQ ID NO: 299874 - DNA, 21 bp, Artificial sequence
  SiRNA target sequence
tctgaattgtgaatatcatga

SEQ ID NO: 299875 - DNA, 21 bp, Artificial sequence
  SiRNA target sequence
ctgaattgtgaatatcatgaa

SEQ ID NO: 299876 - DNA, 21 bp, Artificial sequence
  SiRNA target sequence
tgaattgtgaatatcatgaaa

SEQ ID NO: 299877 - DNA, 21 bp, Artificial sequence
  SiRNA target sequence
gaattgtgaatatcatgaaaa

SEQ ID NO: 299878 - DNA, 21 bp, Artificial sequence
  SiRNA target sequence
aattgtgaatatcatgaaaat

SEQ ID NO: 299879 - DNA, 21 bp, Artificial sequence
  SiRNA target sequence
attgtgaatatcatgaaaatt

SEQ ID NO: 299880 - DNA, 21 bp, Artificial sequence
  SiRNA target sequence
ttgtgaatatcatgaaaattt

SEQ ID NO: 299881 - DNA, 21 bp, Artificial sequence
  SiRNA target sequence
tgtgaatatcatgaaaattta

SEQ ID NO: 299882 - DNA, 21 bp, Artificial sequence
  SiRNA target sequence
gtgaatatcatgaaaatttat

SEQ ID NO: 299883 - DNA, 21 bp, Artificial sequence
  SiRNA target sequence
tgaatatcatgaaaatttata

SEQ ID NO: 299884 - DNA, 21 bp, Artificial sequence
  SiRNA target sequence
gaatatcatgaaaatttatat

SEQ ID NO: 299885 - DNA, 21 bp, Artificial sequence
  SiRNA target sequence
aatatcatgaaaatttatatg

SEQ ID NO: 299886 - DNA, 21 bp, Artificial sequence
  SiRNA target sequence
atatcatgaaaatttatatga

SEQ ID NO: 299887 - DNA, 21 bp, Artificial sequence
  SiRNA target sequence
tatcatgaaaatttatatgat

SEQ ID NO: 299888 - DNA, 21 bp, Artificial sequence
  SiRNA target sequence
atcatgaaaatttatatgatg

SEQ ID NO: 299889 - DNA, 21 bp, Artificial sequence
  SiRNA target sequence
tcatgaaaatttatatgatgc

SEQ ID NO: 299890 - DNA, 21 bp, Artificial sequence
  SiRNA target sequence
catgaaaatttatatgatgca

SEQ ID NO: 299891 - DNA, 21 bp, Artificial sequence
  SiRNA target sequence
atgaaaatttatatgatgcac

SEQ ID NO: 299892 - DNA, 21 bp, Artificial sequence
  SiRNA target sequence
tgaaaatttatatgatgcact

SEQ ID NO: 299893 - DNA, 21 bp, Artificial sequence
  SiRNA target sequence
gaaaatttatatgatgcacta

SEQ ID NO: 299894 - DNA, 21 bp, Artificial sequence
  SiRNA target sequence
aaaatttatatgatgcactaa

SEQ ID NO: 299895 - DNA, 21 bp, Artificial sequence
  SiRNA target sequence
aaatttatatgatgcactaat

SEQ ID NO: 299896 - DNA, 21 bp, Artificial sequence
  SiRNA target sequence
aatttatatgatgcactaatg

SEQ ID NO: 299897 - DNA, 21 bp, Artificial sequence
  SiRNA target sequence
atttatatgatgcactaatgt

SEQ ID NO: 299898 - DNA, 21 bp, Artificial sequence
  SiRNA target sequence
tttatatgatgcactaatgtc

SEQ ID NO: 299899 - DNA, 21 bp, Artificial sequence
  SiRNA target sequence
ttatatgatgcactaatgtcg

SEQ ID NO: 299900 - DNA, 21 bp, Artificial sequence
  SiRNA target sequence
tatatgatgcactaatgtcgg

SEQ ID NO: 299901 - DNA, 21 bp, Artificial sequence
  SiRNA target sequence
atatgatgcactaatgtcggc

SEQ ID NO: 299902 - DNA, 21 bp, Artificial sequence
  SiRNA target sequence
tatgatgcactaatgtcggcc

SEQ ID NO: 299903 - DNA, 21 bp, Artificial sequence
  SiRNA target sequence
atgatgcactaatgtcggccg

SEQ ID NO: 299904 - DNA, 21 bp, Artificial sequence
  SiRNA target sequence
tgatgcactaatgtcggccga

SEQ ID NO: 299905 - DNA, 21 bp, Artificial sequence
  SiRNA target sequence
gatgcactaatgtcggccgaa

SEQ ID NO: 299906 - DNA, 21 bp, Artificial sequence
  SiRNA target sequence
atgcactaatgtcggccgaat

SEQ ID NO: 299907 - DNA, 21 bp, Artificial sequence
  SiRNA target sequence
tgcactaatgtcggccgaatt

SEQ ID NO: 299908 - DNA, 21 bp, Artificial sequence
  SiRNA target sequence
gcactaatgtcggccgaattt

SEQ ID NO: 299909 - DNA, 21 bp, Artificial sequence
  SiRNA target sequence
cactaatgtcggccgaatttg

SEQ ID NO: 299910 - DNA, 21 bp, Artificial sequence
  SiRNA target sequence
actaatgtcggccgaatttga

SEQ ID NO: 299911 - DNA, 21 bp, Artificial sequence
  SiRNA target sequence
ctaatgtcggccgaatttgaa

SEQ ID NO: 299912 - DNA, 21 bp, Artificial sequence
  SiRNA target sequence
taatgtcggccgaatttgaac

SEQ ID NO: 299913 - DNA, 21 bp, Artificial sequence
  SiRNA target sequence
aatgtcggccgaatttgaaca

SEQ ID NO: 299914 - DNA, 21 bp, Artificial sequence
  SiRNA target sequence
atgtcggccgaatttgaacaa

SEQ ID NO: 299915 - DNA, 21 bp, Artificial sequence
  SiRNA target sequence
tgtcggccgaatttgaacaag

SEQ ID NO: 299916 - DNA, 21 bp, Artificial sequence
  SiRNA target sequence
gtcggccgaatttgaacaagt

SEQ ID NO: 299917 - DNA, 21 bp, Artificial sequence
  SiRNA target sequence
tcggccgaatttgaacaagtt

SEQ ID NO: 299918 - DNA, 21 bp, Artificial sequence
  SiRNA target sequence
cggccgaatttgaacaagttt

SEQ ID NO: 299919 - DNA, 21 bp, Artificial sequence
  SiRNA target sequence
ggccgaatttgaacaagtttg

SEQ ID NO: 299920 - DNA, 21 bp, Artificial sequence
  SiRNA target sequence
gccgaatttgaacaagtttgg

SEQ ID NO: 299921 - DNA, 21 bp, Artificial sequence
  SiRNA target sequence
ccgaatttgaacaagtttggt

SEQ ID NO: 299922 - DNA, 21 bp, Artificial sequence
  SiRNA target sequence
cgaatttgaacaagtttggtt

SEQ ID NO: 299923 - DNA, 21 bp, Artificial sequence
  SiRNA target sequence
gaatttgaacaagtttggttt

SEQ ID NO: 299924 - DNA, 21 bp, Artificial sequence
  SiRNA target sequence
aatttgaacaagtttggttta

SEQ ID NO: 299925 - DNA, 21 bp, Artificial sequence
  SiRNA target sequence
atttgaacaagtttggtttac

SEQ ID NO: 299926 - DNA, 21 bp, Artificial sequence
  SiRNA target sequence
tttgaacaagtttggtttaca

SEQ ID NO: 299927 - DNA, 21 bp, Artificial sequence
  SiRNA target sequence
ttgaacaagtttggtttacat

SEQ ID NO: 299928 - DNA, 21 bp, Artificial sequence
  SiRNA target sequence
tgaacaagtttggtttacatt

SEQ ID NO: 299929 - DNA, 21 bp, Artificial sequence
  SiRNA target sequence
gaacaagtttggtttacatta

SEQ ID NO: 299930 - DNA, 21 bp, Artificial sequence
  SiRNA target sequence
aacaagtttggtttacattat

SEQ ID NO: 299931 - DNA, 21 bp, Artificial sequence
  SiRNA target sequence
acaagtttggtttacattatt

SEQ ID NO: 299932 - DNA, 21 bp, Artificial sequence
  SiRNA target sequence
caagtttggtttacattattg

SEQ ID NO: 299933 - DNA, 21 bp, Artificial sequence
  SiRNA target sequence
aagtttggtttacattattgc

SEQ ID NO: 299934 - DNA, 21 bp, Artificial sequence
  SiRNA target sequence
agtttggtttacattattgct

SEQ ID NO: 299935 - DNA, 21 bp, Artificial sequence
  SiRNA target sequence
gtttggtttacattattgctt

SEQ ID NO: 299936 - DNA, 21 bp, Artificial sequence
  SiRNA target sequence
tttggtttacattattgctta

SEQ ID NO: 299937 - DNA, 21 bp, Artificial sequence
  SiRNA target sequence
ttggtttacattattgcttaa

SEQ ID NO: 299938 - DNA, 21 bp, Artificial sequence
  SiRNA target sequence
tggtttacattattgcttaaa

SEQ ID NO: 299939 - DNA, 21 bp, Artificial sequence
  SiRNA target sequence
ggtttacattattgcttaaat

SEQ ID NO: 299940 - DNA, 21 bp, Artificial sequence
  SiRNA target sequence
gtttacattattgcttaaata

SEQ ID NO: 299941 - DNA, 21 bp, Artificial sequence
  SiRNA target sequence
tttacattattgcttaaatat

SEQ ID NO: 299942 - DNA, 21 bp, Artificial sequence
  SiRNA target sequence
ttacattattgcttaaatatc

SEQ ID NO: 299943 - DNA, 21 bp, Artificial sequence
  SiRNA target sequence
tacattattgcttaaatatct

SEQ ID NO: 299944 - DNA, 21 bp, Artificial sequence
  SiRNA target sequence
acattattgcttaaatatctt

SEQ ID NO: 299945 - DNA, 21 bp, Artificial sequence
  SiRNA target sequence
cattattgcttaaatatcttg

SEQ ID NO: 299946 - DNA, 21 bp, Artificial sequence
  SiRNA target sequence
attattgcttaaatatcttga

SEQ ID NO: 299947 - DNA, 21 bp, Artificial sequence
  SiRNA target sequence
ttattgcttaaatatcttgat

SEQ ID NO: 299948 - DNA, 21 bp, Artificial sequence
  SiRNA target sequence
tattgcttaaatatcttgatt

SEQ ID NO: 299949 - DNA, 21 bp, Artificial sequence
  SiRNA target sequence
attgcttaaatatcttgattt

SEQ ID NO: 299950 - DNA, 21 bp, Artificial sequence
  SiRNA target sequence
ttgcttaaatatcttgatttt

SEQ ID NO: 299951 - DNA, 21 bp, Artificial sequence
  SiRNA target sequence
tgcttaaatatcttgattttg

SEQ ID NO: 299952 - DNA, 21 bp, Artificial sequence
  SiRNA target sequence
gcttaaatatcttgattttgt

SEQ ID NO: 299953 - DNA, 21 bp, Artificial sequence
  SiRNA target sequence
cttaaatatcttgattttgta

SEQ ID NO: 299954 - DNA, 21 bp, Artificial sequence
  SiRNA target sequence
ttaaatatcttgattttgtac

SEQ ID NO: 299955 - DNA, 21 bp, Artificial sequence
  SiRNA target sequence
taaatatcttgattttgtacc

SEQ ID NO: 299956 - DNA, 21 bp, Artificial sequence
  SiRNA target sequence
aaatatcttgattttgtacca

SEQ ID NO: 299957 - DNA, 21 bp, Artificial sequence
  SiRNA target sequence
aatatcttgattttgtaccag

SEQ ID NO: 299958 - DNA, 21 bp, Artificial sequence
  SiRNA target sequence
atatcttgattttgtaccagt

SEQ ID NO: 299959 - DNA, 21 bp, Artificial sequence
  SiRNA target sequence
tatcttgattttgtaccagta

SEQ ID NO: 299960 - DNA, 21 bp, Artificial sequence
  SiRNA target sequence
atcttgattttgtaccagtac

SEQ ID NO: 299961 - DNA, 21 bp, Artificial sequence
  SiRNA target sequence
tcttgattttgtaccagtacc

SEQ ID NO: 299962 - DNA, 21 bp, Artificial sequence
  SiRNA target sequence
cttgattttgtaccagtacca

SEQ ID NO: 299963 - DNA, 21 bp, Artificial sequence
  SiRNA target sequence
ttgattttgtaccagtaccaa

SEQ ID NO: 299964 - DNA, 21 bp, Artificial sequence
  SiRNA target sequence
tgattttgtaccagtaccaat

SEQ ID NO: 299965 - DNA, 21 bp, Artificial sequence
  SiRNA target sequence
gattttgtaccagtaccaatg

SEQ ID NO: 299966 - DNA, 21 bp, Artificial sequence
  SiRNA target sequence
attttgtaccagtaccaatga

SEQ ID NO: 299967 - DNA, 21 bp, Artificial sequence
  SiRNA target sequence
ttttgtaccagtaccaatgaa

SEQ ID NO: 299968 - DNA, 21 bp, Artificial sequence
  SiRNA target sequence
tttgtaccagtaccaatgaat

SEQ ID NO: 299969 - DNA, 21 bp, Artificial sequence
  SiRNA target sequence
ttgtaccagtaccaatgaatt

SEQ ID NO: 299970 - DNA, 21 bp, Artificial sequence
  SiRNA target sequence
tgtaccagtaccaatgaattg

SEQ ID NO: 299971 - DNA, 21 bp, Artificial sequence
  SiRNA target sequence
gtaccagtaccaatgaattgg

SEQ ID NO: 299972 - DNA, 21 bp, Artificial sequence
  SiRNA target sequence
taccagtaccaatgaattgga

SEQ ID NO: 299973 - DNA, 21 bp, Artificial sequence
  SiRNA target sequence
accagtaccaatgaattggag

SEQ ID NO: 299974 - DNA, 21 bp, Artificial sequence
  SiRNA target sequence
ccagtaccaatgaattggaga

SEQ ID NO: 299975 - DNA, 21 bp, Artificial sequence
  SiRNA target sequence
cagtaccaatgaattggagag

SEQ ID NO: 299976 - DNA, 21 bp, Artificial sequence
  SiRNA target sequence
agtaccaatgaattggagagg

SEQ ID NO: 299977 - DNA, 21 bp, Artificial sequence
  SiRNA target sequence
gtaccaatgaattggagagga

SEQ ID NO: 299978 - DNA, 21 bp, Artificial sequence
  SiRNA target sequence
taccaatgaattggagaggaa

SEQ ID NO: 299979 - DNA, 21 bp, Artificial sequence
  SiRNA target sequence
accaatgaattggagaggaat

SEQ ID NO: 299980 - DNA, 21 bp, Artificial sequence
  SiRNA target sequence
ccaatgaattggagaggaatg

SEQ ID NO: 299981 - DNA, 21 bp, Artificial sequence
  SiRNA target sequence
caatgaattggagaggaatgc

SEQ ID NO: 299982 - DNA, 21 bp, Artificial sequence
  SiRNA target sequence
aatgaattggagaggaatgcc

SEQ ID NO: 299983 - DNA, 21 bp, Artificial sequence
  SiRNA target sequence
atgaattggagaggaatgcca

SEQ ID NO: 299984 - DNA, 21 bp, Artificial sequence
  SiRNA target sequence
tgaattggagaggaatgccag

SEQ ID NO: 299985 - DNA, 21 bp, Artificial sequence
  SiRNA target sequence
gaattggagaggaatgccaga

SEQ ID NO: 299986 - DNA, 21 bp, Artificial sequence
  SiRNA target sequence
aattggagaggaatgccagaa

SEQ ID NO: 299987 - DNA, 21 bp, Artificial sequence
  SiRNA target sequence
attggagaggaatgccagaat

SEQ ID NO: 299988 - DNA, 21 bp, Artificial sequence
  SiRNA target sequence
ttggagaggaatgccagaatt

SEQ ID NO: 299989 - DNA, 21 bp, Artificial sequence
  SiRNA target sequence
tggagaggaatgccagaattt

SEQ ID NO: 299990 - DNA, 21 bp, Artificial sequence
  SiRNA target sequence
ggagaggaatgccagaatttc

SEQ ID NO: 299991 - DNA, 21 bp, Artificial sequence
  SiRNA target sequence
gagaggaatgccagaatttcc

SEQ ID NO: 299992 - DNA, 21 bp, Artificial sequence
  SiRNA target sequence
agaggaatgccagaatttcct

SEQ ID NO: 299993 - DNA, 21 bp, Artificial sequence
  SiRNA target sequence
gaggaatgccagaatttccta

SEQ ID NO: 299994 - DNA, 21 bp, Artificial sequence
  SiRNA target sequence
aggaatgccagaatttcctac

SEQ ID NO: 299995 - DNA, 21 bp, Artificial sequence
  SiRNA target sequence
ggaatgccagaatttcctacc

SEQ ID NO: 299996 - DNA, 21 bp, Artificial sequence
  SiRNA target sequence
gaatgccagaatttcctacca

SEQ ID NO: 299997 - DNA, 21 bp, Artificial sequence
  SiRNA target sequence
aatgccagaatttcctaccat

SEQ ID NO: 299998 - DNA, 21 bp, Artificial sequence
  SiRNA target sequence
atgccagaatttcctaccatt

SEQ ID NO: 299999 - DNA, 21 bp, Artificial sequence
  SiRNA target sequence
tgccagaatttcctaccattt

SEQ ID NO: 300000 - DNA, 21 bp, Artificial sequence
  SiRNA target sequence
gccagaatttcctaccattta

SEQ ID NO: 300001 - DNA, 21 bp, Artificial sequence
  SiRNA target sequence
ccagaatttcctaccatttat

SEQ ID NO: 300002 - DNA, 21 bp, Artificial sequence
  SiRNA target sequence
cagaatttcctaccatttatg

SEQ ID NO: 300003 - DNA, 21 bp, Artificial sequence
  SiRNA target sequence
agaatttcctaccatttatgt

SEQ ID NO: 300004 - DNA, 21 bp, Artificial sequence
  SiRNA target sequence
gaatttcctaccatttatgta

SEQ ID NO: 300005 - DNA, 21 bp, Artificial sequence
  SiRNA target sequence
aatttcctaccatttatgtat

SEQ ID NO: 300006 - DNA, 21 bp, Artificial sequence
  SiRNA target sequence
atttcctaccatttatgtatc

SEQ ID NO: 300007 - DNA, 21 bp, Artificial sequence
  SiRNA target sequence
tttcctaccatttatgtatca

SEQ ID NO: 300008 - DNA, 21 bp, Artificial sequence
  SiRNA target sequence
ttcctaccatttatgtatcaa

SEQ ID NO: 300009 - DNA, 21 bp, Artificial sequence
  SiRNA target sequence
tcctaccatttatgtatcaaa

SEQ ID NO: 300010 - DNA, 21 bp, Artificial sequence
  SiRNA target sequence
cctaccatttatgtatcaaaa

SEQ ID NO: 300011 - DNA, 21 bp, Artificial sequence
  SiRNA target sequence
ctaccatttatgtatcaaaac

SEQ ID NO: 300012 - DNA, 21 bp, Artificial sequence
  SiRNA target sequence
taccatttatgtatcaaaaca

SEQ ID NO: 300013 - DNA, 21 bp, Artificial sequence
  SiRNA target sequence
accatttatgtatcaaaacat

SEQ ID NO: 300014 - DNA, 21 bp, Artificial sequence
  SiRNA target sequence
ccatttatgtatcaaaacatt

SEQ ID NO: 300015 - DNA, 21 bp, Artificial sequence
  SiRNA target sequence
catttatgtatcaaaacattt

SEQ ID NO: 300016 - DNA, 21 bp, Artificial sequence
  SiRNA target sequence
atttatgtatcaaaacatttt

SEQ ID NO: 300017 - DNA, 21 bp, Artificial sequence
  SiRNA target sequence
tttatgtatcaaaacattttt

SEQ ID NO: 300018 - DNA, 21 bp, Artificial sequence
  SiRNA target sequence
ttatgtatcaaaacatttttg

SEQ ID NO: 300019 - DNA, 21 bp, Artificial sequence
  SiRNA target sequence
tatgtatcaaaacatttttgg

SEQ ID NO: 300020 - DNA, 21 bp, Artificial sequence
  SiRNA target sequence
atgtatcaaaacatttttggt

SEQ ID NO: 300021 - DNA, 21 bp, Artificial sequence
  SiRNA target sequence
tgtatcaaaacatttttggta

SEQ ID NO: 300022 - DNA, 21 bp, Artificial sequence
  SiRNA target sequence
gtatcaaaacatttttggtat

SEQ ID NO: 300023 - DNA, 21 bp, Artificial sequence
  SiRNA target sequence
tatcaaaacatttttggtatg

SEQ ID NO: 300024 - DNA, 21 bp, Artificial sequence
  SiRNA target sequence
atcaaaacatttttggtatga

SEQ ID NO: 300025 - DNA, 21 bp, Artificial sequence
  SiRNA target sequence
tcaaaacatttttggtatgaa

SEQ ID NO: 300026 - DNA, 21 bp, Artificial sequence
  SiRNA target sequence
caaaacatttttggtatgaat

SEQ ID NO: 300027 - DNA, 21 bp, Artificial sequence
  SiRNA target sequence
aaaacatttttggtatgaatt

SEQ ID NO: 300028 - DNA, 21 bp, Artificial sequence
  SiRNA target sequence
aaacatttttggtatgaatta

SEQ ID NO: 300029 - DNA, 21 bp, Artificial sequence
  SiRNA target sequence
aacatttttggtatgaattat

SEQ ID NO: 300030 - DNA, 21 bp, Artificial sequence
  SiRNA target sequence
acatttttggtatgaattata

SEQ ID NO: 300031 - DNA, 21 bp, Artificial sequence
  SiRNA target sequence
catttttggtatgaattatat

SEQ ID NO: 300032 - DNA, 21 bp, Artificial sequence
  SiRNA target sequence
atttttggtatgaattatatc

SEQ ID NO: 300033 - DNA, 21 bp, Artificial sequence
  SiRNA target sequence
tttttggtatgaattatatcg

SEQ ID NO: 300034 - DNA, 21 bp, Artificial sequence
  SiRNA target sequence
ttttggtatgaattatatcgc

SEQ ID NO: 300035 - DNA, 21 bp, Artificial sequence
  SiRNA target sequence
tttggtatgaattatatcgca

SEQ ID NO: 300036 - DNA, 21 bp, Artificial sequence
  SiRNA target sequence
ttggtatgaattatatcgcat

SEQ ID NO: 300037 - DNA, 21 bp, Artificial sequence
  SiRNA target sequence
tggtatgaattatatcgcatt

SEQ ID NO: 300038 - DNA, 21 bp, Artificial sequence
  SiRNA target sequence
ggtatgaattatatcgcattg

SEQ ID NO: 300039 - DNA, 21 bp, Artificial sequence
  SiRNA target sequence
gtatgaattatatcgcattgg

SEQ ID NO: 300040 - DNA, 21 bp, Artificial sequence
  SiRNA target sequence
tatgaattatatcgcattgga

SEQ ID NO: 300041 - DNA, 21 bp, Artificial sequence
  SiRNA target sequence
atgaattatatcgcattggat

SEQ ID NO: 300042 - DNA, 21 bp, Artificial sequence
  SiRNA target sequence
tgaattatatcgcattggatt

SEQ ID NO: 300043 - DNA, 21 bp, Artificial sequence
  SiRNA target sequence
gaattatatcgcattggattt

SEQ ID NO: 300044 - DNA, 21 bp, Artificial sequence
  SiRNA target sequence
aattatatcgcattggatttt

SEQ ID NO: 300045 - DNA, 21 bp, Artificial sequence
  SiRNA target sequence
attatatcgcattggattttt

SEQ ID NO: 300046 - DNA, 21 bp, Artificial sequence
  SiRNA target sequence
ttatatcgcattggatttttg

SEQ ID NO: 300047 - DNA, 21 bp, Artificial sequence
  SiRNA target sequence
tatatcgcattggatttttga

SEQ ID NO: 300048 - DNA, 21 bp, Artificial sequence
  SiRNA target sequence
atatcgcattggatttttgaa

SEQ ID NO: 300049 - DNA, 21 bp, Artificial sequence
  SiRNA target sequence
tatcgcattggatttttgaat

SEQ ID NO: 300050 - DNA, 21 bp, Artificial sequence
  SiRNA target sequence
atcgcattggatttttgaata

SEQ ID NO: 300051 - DNA, 21 bp, Artificial sequence
  SiRNA target sequence
tcgcattggatttttgaataa

SEQ ID NO: 300052 - DNA, 21 bp, Artificial sequence
  SiRNA target sequence
cgcattggatttttgaataag

SEQ ID NO: 300053 - DNA, 21 bp, Artificial sequence
  SiRNA target sequence
gcattggatttttgaataagt

SEQ ID NO: 300054 - DNA, 21 bp, Artificial sequence
  SiRNA target sequence
cattggatttttgaataagtt

SEQ ID NO: 300055 - DNA, 21 bp, Artificial sequence
  SiRNA target sequence
attggatttttgaataagtta

SEQ ID NO: 300056 - DNA, 21 bp, Artificial sequence
  SiRNA target sequence
ttggatttttgaataagttat

SEQ ID NO: 300057 - DNA, 21 bp, Artificial sequence
  SiRNA target sequence
tggatttttgaataagttata

SEQ ID NO: 300058 - DNA, 21 bp, Artificial sequence
  SiRNA target sequence
ggatttttgaataagttatat

SEQ ID NO: 300059 - DNA, 21 bp, Artificial sequence
  SiRNA target sequence
gatttttgaataagttatata

SEQ ID NO: 300060 - DNA, 21 bp, Artificial sequence
  SiRNA target sequence
atttttgaataagttatataa

SEQ ID NO: 300061 - DNA, 21 bp, Artificial sequence
  SiRNA target sequence
tttttgaataagttatataaa

SEQ ID NO: 300062 - DNA, 21 bp, Artificial sequence
  SiRNA target sequence
ttttgaataagttatataaat

SEQ ID NO: 300063 - DNA, 21 bp, Artificial sequence
  SiRNA target sequence
tttgaataagttatataaatg

SEQ ID NO: 300064 - DNA, 21 bp, Artificial sequence
  SiRNA target sequence
ttgaataagttatataaatgt

SEQ ID NO: 300065 - DNA, 21 bp, Artificial sequence
  SiRNA target sequence
tgaataagttatataaatgtg

SEQ ID NO: 300066 - DNA, 21 bp, Artificial sequence
  SiRNA target sequence
gaataagttatataaatgtgg

SEQ ID NO: 300067 - DNA, 21 bp, Artificial sequence
  SiRNA target sequence
aataagttatataaatgtgga

SEQ ID NO: 300068 - DNA, 21 bp, Artificial sequence
  SiRNA target sequence
ataagttatataaatgtggaa

SEQ ID NO: 300069 - DNA, 21 bp, Artificial sequence
  SiRNA target sequence
taagttatataaatgtggaac

SEQ ID NO: 300070 - DNA, 21 bp, Artificial sequence
  SiRNA target sequence
aagttatataaatgtggaact

SEQ ID NO: 300071 - DNA, 21 bp, Artificial sequence
  SiRNA target sequence
agttatataaatgtggaactt

SEQ ID NO: 300072 - DNA, 21 bp, Artificial sequence
  SiRNA target sequence
gttatataaatgtggaacttg

SEQ ID NO: 300073 - DNA, 21 bp, Artificial sequence
  SiRNA target sequence
ttatataaatgtggaacttgg

SEQ ID NO: 300074 - DNA, 21 bp, Artificial sequence
  SiRNA target sequence
tatataaatgtggaacttggg

SEQ ID NO: 300075 - DNA, 21 bp, Artificial sequence
  SiRNA target sequence
atataaatgtggaacttggga

SEQ ID NO: 300076 - DNA, 21 bp, Artificial sequence
  SiRNA target sequence
tataaatgtggaacttgggag

SEQ ID NO: 300077 - DNA, 21 bp, Artificial sequence
  SiRNA target sequence
ataaatgtggaacttgggagt

SEQ ID NO: 300078 - DNA, 21 bp, Artificial sequence
  SiRNA target sequence
taaatgtggaacttgggagtc

SEQ ID NO: 300079 - DNA, 21 bp, Artificial sequence
  SiRNA target sequence
aaatgtggaacttgggagtca

SEQ ID NO: 300080 - DNA, 21 bp, Artificial sequence
  SiRNA target sequence
aatgtggaacttgggagtcag

SEQ ID NO: 300081 - DNA, 21 bp, Artificial sequence
  SiRNA target sequence
atgtggaacttgggagtcagt

SEQ ID NO: 300082 - DNA, 21 bp, Artificial sequence
  SiRNA target sequence
tgtggaacttgggagtcagta

SEQ ID NO: 300083 - DNA, 21 bp, Artificial sequence
  SiRNA target sequence
gtggaacttgggagtcagtat

SEQ ID NO: 300084 - DNA, 21 bp, Artificial sequence
  SiRNA target sequence
tggaacttgggagtcagtatt

SEQ ID NO: 300085 - DNA, 21 bp, Artificial sequence
  SiRNA target sequence
ggaacttgggagtcagtatta

SEQ ID NO: 300086 - DNA, 21 bp, Artificial sequence
  SiRNA target sequence
gaacttgggagtcagtattaa

SEQ ID NO: 300087 - DNA, 21 bp, Artificial sequence
  SiRNA target sequence
aacttgggagtcagtattaaa

SEQ ID NO: 300088 - DNA, 21 bp, Artificial sequence
  SiRNA target sequence
acttgggagtcagtattaaat

SEQ ID NO: 300089 - DNA, 21 bp, Artificial sequence
  SiRNA target sequence
cttgggagtcagtattaaatc

SEQ ID NO: 300090 - DNA, 21 bp, Artificial sequence
  SiRNA target sequence
ttgggagtcagtattaaatct

SEQ ID NO: 300091 - DNA, 21 bp, Artificial sequence
  SiRNA target sequence
tgggagtcagtattaaatctc

SEQ ID NO: 300092 - DNA, 21 bp, Artificial sequence
  SiRNA target sequence
gggagtcagtattaaatctct

SEQ ID NO: 300093 - DNA, 21 bp, Artificial sequence
  SiRNA target sequence
ggagtcagtattaaatctctt

SEQ ID NO: 300094 - DNA, 21 bp, Artificial sequence
  SiRNA target sequence
gagtcagtattaaatctctta

SEQ ID NO: 300095 - DNA, 21 bp, Artificial sequence
  SiRNA target sequence
agtcagtattaaatctcttag

SEQ ID NO: 300096 - DNA, 21 bp, Artificial sequence
  SiRNA target sequence
gtcagtattaaatctcttagc

SEQ ID NO: 300097 - DNA, 21 bp, Artificial sequence
  SiRNA target sequence
tcagtattaaatctcttagcc

SEQ ID NO: 300098 - DNA, 21 bp, Artificial sequence
  SiRNA target sequence
cagtattaaatctcttagccg

SEQ ID NO: 300099 - DNA, 21 bp, Artificial sequence
  SiRNA target sequence
agtattaaatctcttagccgg

SEQ ID NO: 300100 - DNA, 21 bp, Artificial sequence
  SiRNA target sequence
gtattaaatctcttagccgga

SEQ ID NO: 300101 - DNA, 21 bp, Artificial sequence
  SiRNA target sequence
tattaaatctcttagccggag

SEQ ID NO: 300102 - DNA, 21 bp, Artificial sequence
  SiRNA target sequence
attaaatctcttagccggaga

SEQ ID NO: 300103 - DNA, 21 bp, Artificial sequence
  SiRNA target sequence
ttaaatctcttagccggagat

SEQ ID NO: 300104 - DNA, 21 bp, Artificial sequence
  SiRNA target sequence
taaatctcttagccggagata

SEQ ID NO: 300105 - DNA, 21 bp, Artificial sequence
  SiRNA target sequence
aaatctcttagccggagatat

SEQ ID NO: 300106 - DNA, 21 bp, Artificial sequence
  SiRNA target sequence
aatctcttagccggagatata

SEQ ID NO: 300107 - DNA, 21 bp, Artificial sequence
  SiRNA target sequence
atctcttagccggagatatag

SEQ ID NO: 300108 - DNA, 21 bp, Artificial sequence
  SiRNA target sequence
tctcttagccggagatataga

SEQ ID NO: 300109 - DNA, 21 bp, Artificial sequence
  SiRNA target sequence
ctcttagccggagatatagaa

SEQ ID NO: 300110 - DNA, 21 bp, Artificial sequence
  SiRNA target sequence
tcttagccggagatatagaat

SEQ ID NO: 300111 - DNA, 21 bp, Artificial sequence
  SiRNA target sequence
cttagccggagatatagaatt

SEQ ID NO: 300112 - DNA, 21 bp, Artificial sequence
  SiRNA target sequence
ttagccggagatatagaattg

SEQ ID NO: 300113 - DNA, 21 bp, Artificial sequence
  SiRNA target sequence
tagccggagatatagaattga

SEQ ID NO: 300114 - DNA, 21 bp, Artificial sequence
  SiRNA target sequence
agccggagatatagaattgaa

SEQ ID NO: 300115 - DNA, 21 bp, Artificial sequence
  SiRNA target sequence
gccggagatatagaattgaat

SEQ ID NO: 300116 - DNA, 21 bp, Artificial sequence
  SiRNA target sequence
ccggagatatagaattgaatc

SEQ ID NO: 300117 - DNA, 21 bp, Artificial sequence
  SiRNA target sequence
cggagatatagaattgaatcc

SEQ ID NO: 300118 - DNA, 21 bp, Artificial sequence
  SiRNA target sequence
ggagatatagaattgaatcct

SEQ ID NO: 300119 - DNA, 21 bp, Artificial sequence
  SiRNA target sequence
gagatatagaattgaatcctg

SEQ ID NO: 300120 - DNA, 21 bp, Artificial sequence
  SiRNA target sequence
agatatagaattgaatcctgg

SEQ ID NO: 300121 - DNA, 21 bp, Artificial sequence
  SiRNA target sequence
gatatagaattgaatcctgga

SEQ ID NO: 300122 - DNA, 21 bp, Artificial sequence
  SiRNA target sequence
atatagaattgaatcctggac

SEQ ID NO: 300123 - DNA, 21 bp, Artificial sequence
  SiRNA target sequence
tatagaattgaatcctggacc

SEQ ID NO: 300124 - DNA, 21 bp, Artificial sequence
  SiRNA target sequence
atagaattgaatcctggaccc

SEQ ID NO: 300125 - DNA, 21 bp, Artificial sequence
  SiRNA target sequence
tagaattgaatcctggaccca

SEQ ID NO: 300126 - DNA, 21 bp, Artificial sequence
  SiRNA target sequence
agaattgaatcctggacccac

SEQ ID NO: 300127 - DNA, 21 bp, Artificial sequence
  SiRNA target sequence
gaattgaatcctggacccact

SEQ ID NO: 300128 - DNA, 21 bp, Artificial sequence
  SiRNA target sequence
aattgaatcctggacccactg

SEQ ID NO: 300129 - DNA, 21 bp, Artificial sequence
  SiRNA target sequence
attgaatcctggacccactga

SEQ ID NO: 300130 - DNA, 21 bp, Artificial sequence
  SiRNA target sequence
ttgaatcctggacccactgat

SEQ ID NO: 300131 - DNA, 21 bp, Artificial sequence
  SiRNA target sequence
tgaatcctggacccactgata

SEQ ID NO: 300132 - DNA, 21 bp, Artificial sequence
  SiRNA target sequence
gaatcctggacccactgatat

SEQ ID NO: 300133 - DNA, 21 bp, Artificial sequence
  SiRNA target sequence
aatcctggacccactgatatt

SEQ ID NO: 300134 - DNA, 21 bp, Artificial sequence
  SiRNA target sequence
atcctggacccactgatattt

SEQ ID NO: 300135 - DNA, 21 bp, Artificial sequence
  SiRNA target sequence
tcctggacccactgatatttc

SEQ ID NO: 300136 - DNA, 21 bp, Artificial sequence
  SiRNA target sequence
cctggacccactgatatttct

SEQ ID NO: 300137 - DNA, 21 bp, Artificial sequence
  SiRNA target sequence
ctggacccactgatatttctt

SEQ ID NO: 300138 - DNA, 21 bp, Artificial sequence
  SiRNA target sequence
tggacccactgatatttctta

SEQ ID NO: 300139 - DNA, 21 bp, Artificial sequence
  SiRNA target sequence
ggacccactgatatttcttac

SEQ ID NO: 300140 - DNA, 21 bp, Artificial sequence
  SiRNA target sequence
gacccactgatatttcttaca

SEQ ID NO: 300141 - DNA, 21 bp, Artificial sequence
  SiRNA target sequence
acccactgatatttcttacaa

SEQ ID NO: 300142 - DNA, 21 bp, Artificial sequence
  SiRNA target sequence
cccactgatatttcttacaaa

SEQ ID NO: 300143 - DNA, 21 bp, Artificial sequence
  SiRNA target sequence
ccactgatatttcttacaaag

SEQ ID NO: 300144 - DNA, 21 bp, Artificial sequence
  SiRNA target sequence
cactgatatttcttacaaaga

SEQ ID NO: 300145 - DNA, 21 bp, Artificial sequence
  SiRNA target sequence
actgatatttcttacaaagaa

SEQ ID NO: 300146 - DNA, 21 bp, Artificial sequence
  SiRNA target sequence
ctgatatttcttacaaagaac

SEQ ID NO: 300147 - DNA, 21 bp, Artificial sequence
  SiRNA target sequence
tgatatttcttacaaagaaca

SEQ ID NO: 300148 - DNA, 21 bp, Artificial sequence
  SiRNA target sequence
gatatttcttacaaagaacaa

SEQ ID NO: 300149 - DNA, 21 bp, Artificial sequence
  SiRNA target sequence
atatttcttacaaagaacaat

SEQ ID NO: 300150 - DNA, 21 bp, Artificial sequence
  SiRNA target sequence
tatttcttacaaagaacaatg

SEQ ID NO: 300151 - DNA, 21 bp, Artificial sequence
  SiRNA target sequence
atttcttacaaagaacaatgc

SEQ ID NO: 300152 - DNA, 21 bp, Artificial sequence
  SiRNA target sequence
tttcttacaaagaacaatgcc

SEQ ID NO: 300153 - DNA, 21 bp, Artificial sequence
  SiRNA target sequence
ttcttacaaagaacaatgcca

SEQ ID NO: 300154 - DNA, 21 bp, Artificial sequence
  SiRNA target sequence
tcttacaaagaacaatgccaa

SEQ ID NO: 300155 - DNA, 21 bp, Artificial sequence
  SiRNA target sequence
cttacaaagaacaatgccaac

SEQ ID NO: 300156 - DNA, 21 bp, Artificial sequence
  SiRNA target sequence
ttacaaagaacaatgccaacg

SEQ ID NO: 300157 - DNA, 21 bp, Artificial sequence
  SiRNA target sequence
tacaaagaacaatgccaacga

SEQ ID NO: 300158 - DNA, 21 bp, Artificial sequence
  SiRNA target sequence
acaaagaacaatgccaacgac

SEQ ID NO: 300159 - DNA, 21 bp, Artificial sequence
  SiRNA target sequence
caaagaacaatgccaacgacg

SEQ ID NO: 300160 - DNA, 21 bp, Artificial sequence
  SiRNA target sequence
aaagaacaatgccaacgacga

SEQ ID NO: 300161 - DNA, 21 bp, Artificial sequence
  SiRNA target sequence
aagaacaatgccaacgacgac

SEQ ID NO: 300162 - DNA, 21 bp, Artificial sequence
  SiRNA target sequence
agaacaatgccaacgacgaca

SEQ ID NO: 300163 - DNA, 21 bp, Artificial sequence
  SiRNA target sequence
gaacaatgccaacgacgacaa

SEQ ID NO: 300164 - DNA, 21 bp, Artificial sequence
  SiRNA target sequence
aacaatgccaacgacgacaac

SEQ ID NO: 300165 - DNA, 21 bp, Artificial sequence
  SiRNA target sequence
acaatgccaacgacgacaacg

SEQ ID NO: 300166 - DNA, 21 bp, Artificial sequence
  SiRNA target sequence
caatgccaacgacgacaacga

SEQ ID NO: 300167 - DNA, 21 bp, Artificial sequence
  SiRNA target sequence
aatgccaacgacgacaacgac

SEQ ID NO: 300168 - DNA, 21 bp, Artificial sequence
  SiRNA target sequence
atgccaacgacgacaacgacg

SEQ ID NO: 300169 - DNA, 21 bp, Artificial sequence
  SiRNA target sequence
tgccaacgacgacaacgacgc

SEQ ID NO: 300170 - DNA, 21 bp, Artificial sequence
  SiRNA target sequence
gccaacgacgacaacgacgca

SEQ ID NO: 300171 - DNA, 21 bp, Artificial sequence
  SiRNA target sequence
ccaacgacgacaacgacgcaa

SEQ ID NO: 300172 - DNA, 21 bp, Artificial sequence
  SiRNA target sequence
caacgacgacaacgacgcaaa

SEQ ID NO: 300173 - DNA, 21 bp, Artificial sequence
  SiRNA target sequence
aacgacgacaacgacgcaaac

SEQ ID NO: 300174 - DNA, 21 bp, Artificial sequence
  SiRNA target sequence
acgacgacaacgacgcaaacg

SEQ ID NO: 300175 - DNA, 21 bp, Artificial sequence
  SiRNA target sequence
cgacgacaacgacgcaaacga

SEQ ID NO: 300176 - DNA, 21 bp, Artificial sequence
  SiRNA target sequence
gacgacaacgacgcaaacgaa

SEQ ID NO: 300177 - DNA, 21 bp, Artificial sequence
  SiRNA target sequence
acgacaacgacgcaaacgaat

SEQ ID NO: 300178 - DNA, 21 bp, Artificial sequence
  SiRNA target sequence
cgacaacgacgcaaacgaatt

SEQ ID NO: 300179 - DNA, 21 bp, Artificial sequence
  SiRNA target sequence
gacaacgacgcaaacgaattt

SEQ ID NO: 300180 - DNA, 21 bp, Artificial sequence
  SiRNA target sequence
acaacgacgcaaacgaatttc

SEQ ID NO: 300181 - DNA, 21 bp, Artificial sequence
  SiRNA target sequence
caacgacgcaaacgaatttct

SEQ ID NO: 300182 - DNA, 21 bp, Artificial sequence
  SiRNA target sequence
aacgacgcaaacgaatttcta

SEQ ID NO: 300183 - DNA, 21 bp, Artificial sequence
  SiRNA target sequence
acgacgcaaacgaatttctaa

SEQ ID NO: 300184 - DNA, 21 bp, Artificial sequence
  SiRNA target sequence
cgacgcaaacgaatttctaaa

SEQ ID NO: 300185 - DNA, 21 bp, Artificial sequence
  SiRNA target sequence
gacgcaaacgaatttctaaat

SEQ ID NO: 300186 - DNA, 21 bp, Artificial sequence
  SiRNA target sequence
acgcaaacgaatttctaaatc

SEQ ID NO: 300187 - DNA, 21 bp, Artificial sequence
  SiRNA target sequence
cgcaaacgaatttctaaatct

SEQ ID NO: 300188 - DNA, 21 bp, Artificial sequence
  SiRNA target sequence
gcaaacgaatttctaaatctt

SEQ ID NO: 300189 - DNA, 21 bp, Artificial sequence
  SiRNA target sequence
caaacgaatttctaaatctta

SEQ ID NO: 300190 - DNA, 21 bp, Artificial sequence
  SiRNA target sequence
aaacgaatttctaaatcttat

SEQ ID NO: 300191 - DNA, 21 bp, Artificial sequence
  SiRNA target sequence
aacgaatttctaaatcttatg

SEQ ID NO: 300192 - DNA, 21 bp, Artificial sequence
  SiRNA target sequence
acgaatttctaaatcttatga

SEQ ID NO: 300193 - DNA, 21 bp, Artificial sequence
  SiRNA target sequence
cgaatttctaaatcttatgaa

SEQ ID NO: 300194 - DNA, 21 bp, Artificial sequence
  SiRNA target sequence
gaatttctaaatcttatgaag

SEQ ID NO: 300195 - DNA, 21 bp, Artificial sequence
  SiRNA target sequence
aatttctaaatcttatgaaga

SEQ ID NO: 300196 - DNA, 21 bp, Artificial sequence
  SiRNA target sequence
atttctaaatcttatgaagaa

SEQ ID NO: 300197 - DNA, 21 bp, Artificial sequence
  SiRNA target sequence
tttctaaatcttatgaagaaa

SEQ ID NO: 300198 - DNA, 21 bp, Artificial sequence
  SiRNA target sequence
ttctaaatcttatgaagaaat

SEQ ID NO: 300199 - DNA, 21 bp, Artificial sequence
  SiRNA target sequence
tctaaatcttatgaagaaatc

SEQ ID NO: 300200 - DNA, 21 bp, Artificial sequence
  SiRNA target sequence
ctaaatcttatgaagaaatca

SEQ ID NO: 300201 - DNA, 21 bp, Artificial sequence
  SiRNA target sequence
taaatcttatgaagaaatcaa

SEQ ID NO: 300202 - DNA, 21 bp, Artificial sequence
  SiRNA target sequence
aaatcttatgaagaaatcaaa

SEQ ID NO: 300203 - DNA, 21 bp, Artificial sequence
  SiRNA target sequence
aatcttatgaagaaatcaaaa

SEQ ID NO: 300204 - DNA, 21 bp, Artificial sequence
  SiRNA target sequence
atcttatgaagaaatcaaaat

SEQ ID NO: 300205 - DNA, 21 bp, Artificial sequence
  SiRNA target sequence
tcttatgaagaaatcaaaatg

SEQ ID NO: 300206 - DNA, 21 bp, Artificial sequence
  SiRNA target sequence
cttatgaagaaatcaaaatgc

SEQ ID NO: 300207 - DNA, 21 bp, Artificial sequence
  SiRNA target sequence
ttatgaagaaatcaaaatgca

SEQ ID NO: 300208 - DNA, 21 bp, Artificial sequence
  SiRNA target sequence
tatgaagaaatcaaaatgcaa

SEQ ID NO: 300209 - DNA, 21 bp, Artificial sequence
  SiRNA target sequence
atgaagaaatcaaaatgcaac

SEQ ID NO: 300210 - DNA, 21 bp, Artificial sequence
  SiRNA target sequence
tgaagaaatcaaaatgcaaca

SEQ ID NO: 300211 - DNA, 21 bp, Artificial sequence
  SiRNA target sequence
gaagaaatcaaaatgcaacaa

SEQ ID NO: 300212 - DNA, 21 bp, Artificial sequence
  SiRNA target sequence
aagaaatcaaaatgcaacaac

SEQ ID NO: 300213 - DNA, 21 bp, Artificial sequence
  SiRNA target sequence
agaaatcaaaatgcaacaaca

SEQ ID NO: 300214 - DNA, 21 bp, Artificial sequence
  SiRNA target sequence
gaaatcaaaatgcaacaacat

SEQ ID NO: 300215 - DNA, 21 bp, Artificial sequence
  SiRNA target sequence
aaatcaaaatgcaacaacata

SEQ ID NO: 300216 - DNA, 21 bp, Artificial sequence
  SiRNA target sequence
aatcaaaatgcaacaacatat

SEQ ID NO: 300217 - DNA, 21 bp, Artificial sequence
  SiRNA target sequence
atcaaaatgcaacaacatatt

SEQ ID NO: 300218 - DNA, 21 bp, Artificial sequence
  SiRNA target sequence
tcaaaatgcaacaacatattg

SEQ ID NO: 300219 - DNA, 21 bp, Artificial sequence
  SiRNA target sequence
caaaatgcaacaacatattga

SEQ ID NO: 300220 - DNA, 21 bp, Artificial sequence
  SiRNA target sequence
aaaatgcaacaacatattgat

SEQ ID NO: 300221 - DNA, 21 bp, Artificial sequence
  SiRNA target sequence
aaatgcaacaacatattgata

SEQ ID NO: 300222 - DNA, 21 bp, Artificial sequence
  SiRNA target sequence
aatgcaacaacatattgataa

SEQ ID NO: 300223 - DNA, 21 bp, Artificial sequence
  SiRNA target sequence
atgcaacaacatattgataaa

SEQ ID NO: 300224 - DNA, 21 bp, Artificial sequence
  SiRNA target sequence
tgcaacaacatattgataaag

SEQ ID NO: 300225 - DNA, 21 bp, Artificial sequence
  SiRNA target sequence
gcaacaacatattgataaagt

SEQ ID NO: 300226 - DNA, 21 bp, Artificial sequence
  SiRNA target sequence
caacaacatattgataaagta

SEQ ID NO: 300227 - DNA, 21 bp, Artificial sequence
  SiRNA target sequence
aacaacatattgataaagtaa

SEQ ID NO: 300228 - DNA, 21 bp, Artificial sequence
  SiRNA target sequence
acaacatattgataaagtaat

SEQ ID NO: 300229 - DNA, 21 bp, Artificial sequence
  SiRNA target sequence
caacatattgataaagtaata

SEQ ID NO: 300230 - DNA, 21 bp, Artificial sequence
  SiRNA target sequence
aacatattgataaagtaataa

SEQ ID NO: 300231 - DNA, 21 bp, Artificial sequence
  SiRNA target sequence
acatattgataaagtaataag

SEQ ID NO: 300232 - DNA, 21 bp, Artificial sequence
  SiRNA target sequence
catattgataaagtaataaga

SEQ ID NO: 300233 - DNA, 21 bp, Artificial sequence
  SiRNA target sequence
atattgataaagtaataagag

SEQ ID NO: 300234 - DNA, 21 bp, Artificial sequence
  SiRNA target sequence
tattgataaagtaataagaga

SEQ ID NO: 300235 - DNA, 21 bp, Artificial sequence
  SiRNA target sequence
attgataaagtaataagagaa

SEQ ID NO: 300236 - DNA, 21 bp, Artificial sequence
  SiRNA target sequence
ttgataaagtaataagagaag

SEQ ID NO: 300237 - DNA, 21 bp, Artificial sequence
  SiRNA target sequence
tgataaagtaataagagaaga

SEQ ID NO: 300238 - DNA, 21 bp, Artificial sequence
  SiRNA target sequence
gataaagtaataagagaagaa

SEQ ID NO: 300239 - DNA, 21 bp, Artificial sequence
  SiRNA target sequence
ataaagtaataagagaagaat

SEQ ID NO: 300240 - DNA, 21 bp, Artificial sequence
  SiRNA target sequence
taaagtaataagagaagaatt

SEQ ID NO: 300241 - DNA, 21 bp, Artificial sequence
  SiRNA target sequence
aaagtaataagagaagaattt

SEQ ID NO: 300242 - DNA, 21 bp, Artificial sequence
  SiRNA target sequence
aagtaataagagaagaatttc

SEQ ID NO: 300243 - DNA, 21 bp, Artificial sequence
  SiRNA target sequence
agtaataagagaagaatttcg

SEQ ID NO: 300244 - DNA, 21 bp, Artificial sequence
  SiRNA target sequence
gtaataagagaagaatttcgt

SEQ ID NO: 300245 - DNA, 21 bp, Artificial sequence
  SiRNA target sequence
taataagagaagaatttcgtt

SEQ ID NO: 300246 - DNA, 21 bp, Artificial sequence
  SiRNA target sequence
aataagagaagaatttcgttc

SEQ ID NO: 300247 - DNA, 21 bp, Artificial sequence
  SiRNA target sequence
ataagagaagaatttcgttcc

SEQ ID NO: 300248 - DNA, 21 bp, Artificial sequence
  SiRNA target sequence
taagagaagaatttcgttccc

SEQ ID NO: 300249 - DNA, 21 bp, Artificial sequence
  SiRNA target sequence
aagagaagaatttcgttccca

SEQ ID NO: 300250 - DNA, 21 bp, Artificial sequence
  SiRNA target sequence
agagaagaatttcgttcccac

SEQ ID NO: 300251 - DNA, 21 bp, Artificial sequence
  SiRNA target sequence
gagaagaatttcgttcccacc

SEQ ID NO: 300252 - DNA, 21 bp, Artificial sequence
  SiRNA target sequence
agaagaatttcgttcccacca

SEQ ID NO: 300253 - DNA, 21 bp, Artificial sequence
  SiRNA target sequence
gaagaatttcgttcccaccag

SEQ ID NO: 300254 - DNA, 21 bp, Artificial sequence
  SiRNA target sequence
aagaatttcgttcccaccaga

SEQ ID NO: 300255 - DNA, 21 bp, Artificial sequence
  SiRNA target sequence
agaatttcgttcccaccagac

SEQ ID NO: 300256 - DNA, 21 bp, Artificial sequence
  SiRNA target sequence
gaatttcgttcccaccagaca

SEQ ID NO: 300257 - DNA, 21 bp, Artificial sequence
  SiRNA target sequence
aatttcgttcccaccagacaa

SEQ ID NO: 300258 - DNA, 21 bp, Artificial sequence
  SiRNA target sequence
atttcgttcccaccagacaaa

SEQ ID NO: 300259 - DNA, 21 bp, Artificial sequence
  SiRNA target sequence
tttcgttcccaccagacaaaa

SEQ ID NO: 300260 - DNA, 21 bp, Artificial sequence
  SiRNA target sequence
ttcgttcccaccagacaaaac

SEQ ID NO: 300261 - DNA, 21 bp, Artificial sequence
  SiRNA target sequence
tcgttcccaccagacaaaacc

SEQ ID NO: 300262 - DNA, 21 bp, Artificial sequence
  SiRNA target sequence
cgttcccaccagacaaaaccc

SEQ ID NO: 300263 - DNA, 21 bp, Artificial sequence
  SiRNA target sequence
gttcccaccagacaaaaccca

SEQ ID NO: 300264 - DNA, 21 bp, Artificial sequence
  SiRNA target sequence
ttcccaccagacaaaacccaa

SEQ ID NO: 300265 - DNA, 21 bp, Artificial sequence
  SiRNA target sequence
tcccaccagacaaaacccaag

SEQ ID NO: 300266 - DNA, 21 bp, Artificial sequence
  SiRNA target sequence
cccaccagacaaaacccaaga

SEQ ID NO: 300267 - DNA, 21 bp, Artificial sequence
  SiRNA target sequence
ccaccagacaaaacccaagaa

SEQ ID NO: 300268 - DNA, 21 bp, Artificial sequence
  SiRNA target sequence
caccagacaaaacccaagaaa

SEQ ID NO: 300269 - DNA, 21 bp, Artificial sequence
  SiRNA target sequence
accagacaaaacccaagaaat

SEQ ID NO: 300270 - DNA, 21 bp, Artificial sequence
  SiRNA target sequence
ccagacaaaacccaagaaatt

SEQ ID NO: 300271 - DNA, 21 bp, Artificial sequence
  SiRNA target sequence
cagacaaaacccaagaaattg

SEQ ID NO: 300272 - DNA, 21 bp, Artificial sequence
  SiRNA target sequence
agacaaaacccaagaaattga

SEQ ID NO: 300273 - DNA, 21 bp, Artificial sequence
  SiRNA target sequence
gacaaaacccaagaaattgaa

SEQ ID NO: 300274 - DNA, 21 bp, Artificial sequence
  SiRNA target sequence
acaaaacccaagaaattgaaa

SEQ ID NO: 300275 - DNA, 21 bp, Artificial sequence
  SiRNA target sequence
caaaacccaagaaattgaaag

SEQ ID NO: 300276 - DNA, 21 bp, Artificial sequence
  SiRNA target sequence
aaaacccaagaaattgaaaga

SEQ ID NO: 300277 - DNA, 21 bp, Artificial sequence
  SiRNA target sequence
aaacccaagaaattgaaagat

SEQ ID NO: 300278 - DNA, 21 bp, Artificial sequence
  SiRNA target sequence
aacccaagaaattgaaagatg

SEQ ID NO: 300279 - DNA, 21 bp, Artificial sequence
  SiRNA target sequence
acccaagaaattgaaagatgt

SEQ ID NO: 300280 - DNA, 21 bp, Artificial sequence
  SiRNA target sequence
cccaagaaattgaaagatgtt

SEQ ID NO: 300281 - DNA, 21 bp, Artificial sequence
  SiRNA target sequence
ccaagaaattgaaagatgtta

SEQ ID NO: 300282 - DNA, 21 bp, Artificial sequence
  SiRNA target sequence
caagaaattgaaagatgttat

SEQ ID NO: 300283 - DNA, 21 bp, Artificial sequence
  SiRNA target sequence
aagaaattgaaagatgttatt

SEQ ID NO: 300284 - DNA, 21 bp, Artificial sequence
  SiRNA target sequence
agaaattgaaagatgttattg

SEQ ID NO: 300285 - DNA, 21 bp, Artificial sequence
  SiRNA target sequence
gaaattgaaagatgttattga

SEQ ID NO: 300286 - DNA, 21 bp, Artificial sequence
  SiRNA target sequence
aaattgaaagatgttattgat

SEQ ID NO: 300287 - DNA, 21 bp, Artificial sequence
  SiRNA target sequence
aattgaaagatgttattgatg

SEQ ID NO: 300288 - DNA, 21 bp, Artificial sequence
  SiRNA target sequence
attgaaagatgttattgatgt

SEQ ID NO: 300289 - DNA, 21 bp, Artificial sequence
  SiRNA target sequence
ttgaaagatgttattgatgtt

SEQ ID NO: 300290 - DNA, 21 bp, Artificial sequence
  SiRNA target sequence
tgaaagatgttattgatgttt

SEQ ID NO: 300291 - DNA, 21 bp, Artificial sequence
  SiRNA target sequence
gaaagatgttattgatgtttc

SEQ ID NO: 300292 - DNA, 21 bp, Artificial sequence
  SiRNA target sequence
aaagatgttattgatgtttct

SEQ ID NO: 300293 - DNA, 21 bp, Artificial sequence
  SiRNA target sequence
aagatgttattgatgtttcta

SEQ ID NO: 300294 - DNA, 21 bp, Artificial sequence
  SiRNA target sequence
agatgttattgatgtttctat

SEQ ID NO: 300295 - DNA, 21 bp, Artificial sequence
  SiRNA target sequence
gatgttattgatgtttctatg

SEQ ID NO: 300296 - DNA, 21 bp, Artificial sequence
  SiRNA target sequence
atgttattgatgtttctatgc

SEQ ID NO: 300297 - DNA, 21 bp, Artificial sequence
  SiRNA target sequence
tgttattgatgtttctatgca

SEQ ID NO: 300298 - DNA, 21 bp, Artificial sequence
  SiRNA target sequence
gttattgatgtttctatgcag

SEQ ID NO: 300299 - DNA, 21 bp, Artificial sequence
  SiRNA target sequence
ttattgatgtttctatgcagg

SEQ ID NO: 300300 - DNA, 21 bp, Artificial sequence
  SiRNA target sequence
tattgatgtttctatgcaggg

SEQ ID NO: 300301 - DNA, 21 bp, Artificial sequence
  SiRNA target sequence
attgatgtttctatgcaggga

SEQ ID NO: 300302 - DNA, 21 bp, Artificial sequence
  SiRNA target sequence
ttgatgtttctatgcagggac

SEQ ID NO: 300303 - DNA, 21 bp, Artificial sequence
  SiRNA target sequence
tgatgtttctatgcagggact

SEQ ID NO: 300304 - DNA, 21 bp, Artificial sequence
  SiRNA target sequence
gatgtttctatgcagggactt

SEQ ID NO: 300305 - DNA, 21 bp, Artificial sequence
  SiRNA target sequence
atgtttctatgcagggacttt

SEQ ID NO: 300306 - DNA, 21 bp, Artificial sequence
  SiRNA target sequence
tgtttctatgcagggactttt

SEQ ID NO: 300307 - DNA, 21 bp, Artificial sequence
  SiRNA target sequence
gtttctatgcagggacttttt

SEQ ID NO: 300308 - DNA, 21 bp, Artificial sequence
  SiRNA target sequence
tttctatgcagggacttttta

SEQ ID NO: 300309 - DNA, 21 bp, Artificial sequence
  SiRNA target sequence
ttctatgcagggactttttaa

SEQ ID NO: 300310 - DNA, 21 bp, Artificial sequence
  SiRNA target sequence
tctatgcagggactttttaat

SEQ ID NO: 300311 - DNA, 21 bp, Artificial sequence
  SiRNA target sequence
ctatgcagggactttttaatt

SEQ ID NO: 300312 - DNA, 21 bp, Artificial sequence
  SiRNA target sequence
tatgcagggactttttaattt

SEQ ID NO: 300313 - DNA, 21 bp, Artificial sequence
  SiRNA target sequence
atgcagggactttttaatttt

SEQ ID NO: 300314 - DNA, 21 bp, Artificial sequence
  SiRNA target sequence
tgcagggactttttaattttc

SEQ ID NO: 300315 - DNA, 21 bp, Artificial sequence
  SiRNA target sequence
gcagggactttttaattttca

SEQ ID NO: 300316 - DNA, 21 bp, Artificial sequence
  SiRNA target sequence
cagggactttttaattttcaa

SEQ ID NO: 300317 - DNA, 21 bp, Artificial sequence
  SiRNA target sequence
agggactttttaattttcaag

SEQ ID NO: 300318 - DNA, 21 bp, Artificial sequence
  SiRNA target sequence
gggactttttaattttcaaga

SEQ ID NO: 300319 - DNA, 21 bp, Artificial sequence
  SiRNA target sequence
ggactttttaattttcaagaa

SEQ ID NO: 300320 - DNA, 21 bp, Artificial sequence
  SiRNA target sequence
gactttttaattttcaagaag

SEQ ID NO: 300321 - DNA, 21 bp, Artificial sequence
  SiRNA target sequence
actttttaattttcaagaaga

SEQ ID NO: 300322 - DNA, 21 bp, Artificial sequence
  SiRNA target sequence
ctttttaattttcaagaagaa

SEQ ID NO: 300323 - DNA, 21 bp, Artificial sequence
  SiRNA target sequence
tttttaattttcaagaagaaa

SEQ ID NO: 300324 - DNA, 21 bp, Artificial sequence
  SiRNA target sequence
ttttaattttcaagaagaaaa

SEQ ID NO: 300325 - DNA, 21 bp, Artificial sequence
  SiRNA target sequence
tttaattttcaagaagaaaag

SEQ ID NO: 300326 - DNA, 21 bp, Artificial sequence
  SiRNA target sequence
ttaattttcaagaagaaaagg

SEQ ID NO: 300327 - DNA, 21 bp, Artificial sequence
  SiRNA target sequence
taattttcaagaagaaaagga

SEQ ID NO: 300328 - DNA, 21 bp, Artificial sequence
  SiRNA target sequence
aattttcaagaagaaaaggat

SEQ ID NO: 300329 - DNA, 21 bp, Artificial sequence
  SiRNA target sequence
attttcaagaagaaaaggata

SEQ ID NO: 300330 - DNA, 21 bp, Artificial sequence
  SiRNA target sequence
ttttcaagaagaaaaggatat

SEQ ID NO: 300331 - DNA, 21 bp, Artificial sequence
  SiRNA target sequence
tttcaagaagaaaaggatatt

SEQ ID NO: 300332 - DNA, 21 bp, Artificial sequence
  SiRNA target sequence
ttcaagaagaaaaggatatta

SEQ ID NO: 300333 - DNA, 21 bp, Artificial sequence
  SiRNA target sequence
tcaagaagaaaaggatattat

SEQ ID NO: 300334 - DNA, 21 bp, Artificial sequence
  SiRNA target sequence
caagaagaaaaggatattatt

SEQ ID NO: 300335 - DNA, 21 bp, Artificial sequence
  SiRNA target sequence
aagaagaaaaggatattatta

SEQ ID NO: 300336 - DNA, 21 bp, Artificial sequence
  SiRNA target sequence
agaagaaaaggatattattaa

SEQ ID NO: 300337 - DNA, 21 bp, Artificial sequence
  SiRNA target sequence
gaagaaaaggatattattaag

SEQ ID NO: 300338 - DNA, 21 bp, Artificial sequence
  SiRNA target sequence
aagaaaaggatattattaagt

SEQ ID NO: 300339 - DNA, 21 bp, Artificial sequence
  SiRNA target sequence
agaaaaggatattattaagtc

SEQ ID NO: 300340 - DNA, 21 bp, Artificial sequence
  SiRNA target sequence
gaaaaggatattattaagtca

SEQ ID NO: 300341 - DNA, 21 bp, Artificial sequence
  SiRNA target sequence
aaaaggatattattaagtcaa

SEQ ID NO: 300342 - DNA, 21 bp, Artificial sequence
  SiRNA target sequence
aaaggatattattaagtcaac

SEQ ID NO: 300343 - DNA, 21 bp, Artificial sequence
  SiRNA target sequence
aaggatattattaagtcaact

SEQ ID NO: 300344 - DNA, 21 bp, Artificial sequence
  SiRNA target sequence
aggatattattaagtcaactg

SEQ ID NO: 300345 - DNA, 21 bp, Artificial sequence
  SiRNA target sequence
ggatattattaagtcaactgc

SEQ ID NO: 300346 - DNA, 21 bp, Artificial sequence
  SiRNA target sequence
gatattattaagtcaactgca

SEQ ID NO: 300347 - DNA, 21 bp, Artificial sequence
  SiRNA target sequence
atattattaagtcaactgcat

SEQ ID NO: 300348 - DNA, 21 bp, Artificial sequence
  SiRNA target sequence
tattattaagtcaactgcata

SEQ ID NO: 300349 - DNA, 21 bp, Artificial sequence
  SiRNA target sequence
attattaagtcaactgcatat

SEQ ID NO: 300350 - DNA, 21 bp, Artificial sequence
  SiRNA target sequence
ttattaagtcaactgcatata

SEQ ID NO: 300351 - DNA, 21 bp, Artificial sequence
  SiRNA target sequence
tattaagtcaactgcatataa

SEQ ID NO: 300352 - DNA, 21 bp, Artificial sequence
  SiRNA target sequence
attaagtcaactgcatataaa

SEQ ID NO: 300353 - DNA, 21 bp, Artificial sequence
  SiRNA target sequence
ttaagtcaactgcatataaat

SEQ ID NO: 300354 - DNA, 21 bp, Artificial sequence
  SiRNA target sequence
taagtcaactgcatataaatt

SEQ ID NO: 300355 - DNA, 21 bp, Artificial sequence
  SiRNA target sequence
aagtcaactgcatataaattc

SEQ ID NO: 300356 - DNA, 21 bp, Artificial sequence
  SiRNA target sequence
agtcaactgcatataaattca

SEQ ID NO: 300357 - DNA, 21 bp, Artificial sequence
  SiRNA target sequence
gtcaactgcatataaattcaa

SEQ ID NO: 300358 - DNA, 21 bp, Artificial sequence
  SiRNA target sequence
tcaactgcatataaattcaat

SEQ ID NO: 300359 - DNA, 21 bp, Artificial sequence
  SiRNA target sequence
caactgcatataaattcaatg

SEQ ID NO: 300360 - DNA, 21 bp, Artificial sequence
  SiRNA target sequence
aactgcatataaattcaatga

SEQ ID NO: 300361 - DNA, 21 bp, Artificial sequence
  SiRNA target sequence
actgcatataaattcaatgat

SEQ ID NO: 300362 - DNA, 21 bp, Artificial sequence
  SiRNA target sequence
ctgcatataaattcaatgata

SEQ ID NO: 300363 - DNA, 21 bp, Artificial sequence
  SiRNA target sequence
tgcatataaattcaatgatac

SEQ ID NO: 300364 - DNA, 21 bp, Artificial sequence
  SiRNA target sequence
gcatataaattcaatgatact

SEQ ID NO: 300365 - DNA, 21 bp, Artificial sequence
  SiRNA target sequence
catataaattcaatgatactc

SEQ ID NO: 300366 - DNA, 21 bp, Artificial sequence
  SiRNA target sequence
atataaattcaatgatactct

SEQ ID NO: 300367 - DNA, 21 bp, Artificial sequence
  SiRNA target sequence
tataaattcaatgatactctg

SEQ ID NO: 300368 - DNA, 21 bp, Artificial sequence
  SiRNA target sequence
ataaattcaatgatactctgg

SEQ ID NO: 300369 - DNA, 21 bp, Artificial sequence
  SiRNA target sequence
taaattcaatgatactctgga

SEQ ID NO: 300370 - DNA, 21 bp, Artificial sequence
  SiRNA target sequence
aaattcaatgatactctggat

SEQ ID NO: 300371 - DNA, 21 bp, Artificial sequence
  SiRNA target sequence
aattcaatgatactctggata

SEQ ID NO: 300372 - DNA, 21 bp, Artificial sequence
  SiRNA target sequence
attcaatgatactctggataa

SEQ ID NO: 300373 - DNA, 21 bp, Artificial sequence
  SiRNA target sequence
ttcaatgatactctggataaa

SEQ ID NO: 300374 - DNA, 21 bp, Artificial sequence
  SiRNA target sequence
tcaatgatactctggataaat

SEQ ID NO: 300375 - DNA, 21 bp, Artificial sequence
  SiRNA target sequence
caatgatactctggataaatc

SEQ ID NO: 300376 - DNA, 21 bp, Artificial sequence
  SiRNA target sequence
aatgatactctggataaatct

SEQ ID NO: 300377 - DNA, 21 bp, Artificial sequence
  SiRNA target sequence
atgatactctggataaatcta

SEQ ID NO: 300378 - DNA, 21 bp, Artificial sequence
  SiRNA target sequence
tgatactctggataaatctaa

SEQ ID NO: 300379 - DNA, 21 bp, Artificial sequence
  SiRNA target sequence
gatactctggataaatctaat

SEQ ID NO: 300380 - DNA, 21 bp, Artificial sequence
  SiRNA target sequence
atactctggataaatctaatc

SEQ ID NO: 300381 - DNA, 21 bp, Artificial sequence
  SiRNA target sequence
tactctggataaatctaatca

SEQ ID NO: 300382 - DNA, 21 bp, Artificial sequence
  SiRNA target sequence
actctggataaatctaatcat

SEQ ID NO: 300383 - DNA, 21 bp, Artificial sequence
  SiRNA target sequence
ctctggataaatctaatcata

SEQ ID NO: 300384 - DNA, 21 bp, Artificial sequence
  SiRNA target sequence
tctggataaatctaatcatat

SEQ ID NO: 300385 - DNA, 21 bp, Artificial sequence
  SiRNA target sequence
ctggataaatctaatcatata

SEQ ID NO: 300386 - DNA, 21 bp, Artificial sequence
  SiRNA target sequence
tggataaatctaatcatataa

SEQ ID NO: 300387 - DNA, 21 bp, Artificial sequence
  SiRNA target sequence
ggataaatctaatcatataat

SEQ ID NO: 300388 - DNA, 21 bp, Artificial sequence
  SiRNA target sequence
gataaatctaatcatataatg

SEQ ID NO: 300389 - DNA, 21 bp, Artificial sequence
  SiRNA target sequence
ataaatctaatcatataatgg

SEQ ID NO: 300390 - DNA, 21 bp, Artificial sequence
  SiRNA target sequence
taaatctaatcatataatgga

SEQ ID NO: 300391 - DNA, 21 bp, Artificial sequence
  SiRNA target sequence
aaatctaatcatataatggat

SEQ ID NO: 300392 - DNA, 21 bp, Artificial sequence
  SiRNA target sequence
aatctaatcatataatggata

SEQ ID NO: 300393 - DNA, 21 bp, Artificial sequence
  SiRNA target sequence
atctaatcatataatggataa

SEQ ID NO: 300394 - DNA, 21 bp, Artificial sequence
  SiRNA target sequence
tctaatcatataatggataat

SEQ ID NO: 300395 - DNA, 21 bp, Artificial sequence
  SiRNA target sequence
ctaatcatataatggataatc

SEQ ID NO: 300396 - DNA, 21 bp, Artificial sequence
  SiRNA target sequence
taatcatataatggataatct

SEQ ID NO: 300397 - DNA, 21 bp, Artificial sequence
  SiRNA target sequence
aatcatataatggataatctt

SEQ ID NO: 300398 - DNA, 21 bp, Artificial sequence
  SiRNA target sequence
atcatataatggataatctta

SEQ ID NO: 300399 - DNA, 21 bp, Artificial sequence
  SiRNA target sequence
tcatataatggataatcttat

SEQ ID NO: 300400 - DNA, 21 bp, Artificial sequence
  SiRNA target sequence
catataatggataatcttata

SEQ ID NO: 300401 - DNA, 21 bp, Artificial sequence
  SiRNA target sequence
atataatggataatcttatac

SEQ ID NO: 300402 - DNA, 21 bp, Artificial sequence
  SiRNA target sequence
tataatggataatcttatacc

SEQ ID NO: 300403 - DNA, 21 bp, Artificial sequence
  SiRNA target sequence
ataatggataatcttatacca

SEQ ID NO: 300404 - DNA, 21 bp, Artificial sequence
  SiRNA target sequence
taatggataatcttataccac

SEQ ID NO: 300405 - DNA, 21 bp, Artificial sequence
  SiRNA target sequence
aatggataatcttataccaca

SEQ ID NO: 300406 - DNA, 21 bp, Artificial sequence
  SiRNA target sequence
atggataatcttataccacaa

SEQ ID NO: 300407 - DNA, 21 bp, Artificial sequence
  SiRNA target sequence
tggataatcttataccacaat

SEQ ID NO: 300408 - DNA, 21 bp, Artificial sequence
  SiRNA target sequence
ggataatcttataccacaatt

SEQ ID NO: 300409 - DNA, 21 bp, Artificial sequence
  SiRNA target sequence
gataatcttataccacaatta

SEQ ID NO: 300410 - DNA, 21 bp, Artificial sequence
  SiRNA target sequence
ataatcttataccacaattag

SEQ ID NO: 300411 - DNA, 21 bp, Artificial sequence
  SiRNA target sequence
taatcttataccacaattaga

SEQ ID NO: 300412 - DNA, 21 bp, Artificial sequence
  SiRNA target sequence
aatcttataccacaattagaa

SEQ ID NO: 300413 - DNA, 21 bp, Artificial sequence
  SiRNA target sequence
atcttataccacaattagaag

SEQ ID NO: 300414 - DNA, 21 bp, Artificial sequence
  SiRNA target sequence
tcttataccacaattagaaga

SEQ ID NO: 300415 - DNA, 21 bp, Artificial sequence
  SiRNA target sequence
cttataccacaattagaagaa

SEQ ID NO: 300416 - DNA, 21 bp, Artificial sequence
  SiRNA target sequence
ttataccacaattagaagaaa

SEQ ID NO: 300417 - DNA, 21 bp, Artificial sequence
  SiRNA target sequence
tataccacaattagaagaaac

SEQ ID NO: 300418 - DNA, 21 bp, Artificial sequence
  SiRNA target sequence
ataccacaattagaagaaacg

SEQ ID NO: 300419 - DNA, 21 bp, Artificial sequence
  SiRNA target sequence
taccacaattagaagaaacgt

SEQ ID NO: 300420 - DNA, 21 bp, Artificial sequence
  SiRNA target sequence
accacaattagaagaaacgtt

SEQ ID NO: 300421 - DNA, 21 bp, Artificial sequence
  SiRNA target sequence
ccacaattagaagaaacgtta

SEQ ID NO: 300422 - DNA, 21 bp, Artificial sequence
  SiRNA target sequence
cacaattagaagaaacgttag

SEQ ID NO: 300423 - DNA, 21 bp, Artificial sequence
  SiRNA target sequence
acaattagaagaaacgttagc

SEQ ID NO: 300424 - DNA, 21 bp, Artificial sequence
  SiRNA target sequence
caattagaagaaacgttagca

SEQ ID NO: 300425 - DNA, 21 bp, Artificial sequence
  SiRNA target sequence
aattagaagaaacgttagcag

SEQ ID NO: 300426 - DNA, 21 bp, Artificial sequence
  SiRNA target sequence
attagaagaaacgttagcagg

SEQ ID NO: 300427 - DNA, 21 bp, Artificial sequence
  SiRNA target sequence
ttagaagaaacgttagcaggc

SEQ ID NO: 300428 - DNA, 21 bp, Artificial sequence
  SiRNA target sequence
tagaagaaacgttagcaggct

SEQ ID NO: 300429 - DNA, 21 bp, Artificial sequence
  SiRNA target sequence
agaagaaacgttagcaggctt

SEQ ID NO: 300430 - DNA, 21 bp, Artificial sequence
  SiRNA target sequence
gaagaaacgttagcaggcttt

SEQ ID NO: 300431 - DNA, 21 bp, Artificial sequence
  SiRNA target sequence
aagaaacgttagcaggcttta

SEQ ID NO: 300432 - DNA, 21 bp, Artificial sequence
  SiRNA target sequence
agaaacgttagcaggctttag

SEQ ID NO: 300433 - DNA, 21 bp, Artificial sequence
  SiRNA target sequence
gaaacgttagcaggctttaga

SEQ ID NO: 300434 - DNA, 21 bp, Artificial sequence
  SiRNA target sequence
aaacgttagcaggctttagaa

SEQ ID NO: 300435 - DNA, 21 bp, Artificial sequence
  SiRNA target sequence
aacgttagcaggctttagaag

SEQ ID NO: 300436 - DNA, 21 bp, Artificial sequence
  SiRNA target sequence
acgttagcaggctttagaagg

SEQ ID NO: 300437 - DNA, 21 bp, Artificial sequence
  SiRNA target sequence
cgttagcaggctttagaagga

SEQ ID NO: 300438 - DNA, 21 bp, Artificial sequence
  SiRNA target sequence
gttagcaggctttagaaggac

SEQ ID NO: 300439 - DNA, 21 bp, Artificial sequence
  SiRNA target sequence
ttagcaggctttagaaggact

SEQ ID NO: 300440 - DNA, 21 bp, Artificial sequence
  SiRNA target sequence
tagcaggctttagaaggactt

SEQ ID NO: 300441 - DNA, 21 bp, Artificial sequence
  SiRNA target sequence
agcaggctttagaaggactta

SEQ ID NO: 300442 - DNA, 21 bp, Artificial sequence
  SiRNA target sequence
gcaggctttagaaggacttat

SEQ ID NO: 300443 - DNA, 21 bp, Artificial sequence
  SiRNA target sequence
caggctttagaaggacttatg

SEQ ID NO: 300444 - DNA, 21 bp, Artificial sequence
  SiRNA target sequence
aggctttagaaggacttatgc

SEQ ID NO: 300445 - DNA, 21 bp, Artificial sequence
  SiRNA target sequence
ggctttagaaggacttatgcg

SEQ ID NO: 300446 - DNA, 21 bp, Artificial sequence
  SiRNA target sequence
gctttagaaggacttatgcga

SEQ ID NO: 300447 - DNA, 21 bp, Artificial sequence
  SiRNA target sequence
ctttagaaggacttatgcgaa

SEQ ID NO: 300448 - DNA, 21 bp, Artificial sequence
  SiRNA target sequence
tttagaaggacttatgcgaag

SEQ ID NO: 300449 - DNA, 21 bp, Artificial sequence
  SiRNA target sequence
ttagaaggacttatgcgaagt

SEQ ID NO: 300450 - DNA, 21 bp, Artificial sequence
  SiRNA target sequence
tagaaggacttatgcgaagtg

SEQ ID NO: 300451 - DNA, 21 bp, Artificial sequence
  SiRNA target sequence
agaaggacttatgcgaagtgt

SEQ ID NO: 300452 - DNA, 21 bp, Artificial sequence
  SiRNA target sequence
gaaggacttatgcgaagtgtg

SEQ ID NO: 300453 - DNA, 21 bp, Artificial sequence
  SiRNA target sequence
aaggacttatgcgaagtgtga

SEQ ID NO: 300454 - DNA, 21 bp, Artificial sequence
  SiRNA target sequence
aggacttatgcgaagtgtgaa

SEQ ID NO: 300455 - DNA, 21 bp, Artificial sequence
  SiRNA target sequence
ggacttatgcgaagtgtgaac

SEQ ID NO: 300456 - DNA, 21 bp, Artificial sequence
  SiRNA target sequence
gacttatgcgaagtgtgaaca

SEQ ID NO: 300457 - DNA, 21 bp, Artificial sequence
  SiRNA target sequence
acttatgcgaagtgtgaacaa

SEQ ID NO: 300458 - DNA, 21 bp, Artificial sequence
  SiRNA target sequence
cttatgcgaagtgtgaacaaa

SEQ ID NO: 300459 - DNA, 21 bp, Artificial sequence
  SiRNA target sequence
ttatgcgaagtgtgaacaaaa

SEQ ID NO: 300460 - DNA, 21 bp, Artificial sequence
  SiRNA target sequence
tatgcgaagtgtgaacaaaag

SEQ ID NO: 300461 - DNA, 21 bp, Artificial sequence
  SiRNA target sequence
atgcgaagtgtgaacaaaagt

SEQ ID NO: 300462 - DNA, 21 bp, Artificial sequence
  SiRNA target sequence
tgcgaagtgtgaacaaaagtt

SEQ ID NO: 300463 - DNA, 21 bp, Artificial sequence
  SiRNA target sequence
gcgaagtgtgaacaaaagtta

SEQ ID NO: 300464 - DNA, 21 bp, Artificial sequence
  SiRNA target sequence
cgaagtgtgaacaaaagttat

SEQ ID NO: 300465 - DNA, 21 bp, Artificial sequence
  SiRNA target sequence
gaagtgtgaacaaaagttatt

SEQ ID NO: 300466 - DNA, 21 bp, Artificial sequence
  SiRNA target sequence
aagtgtgaacaaaagttattt

SEQ ID NO: 300467 - DNA, 21 bp, Artificial sequence
  SiRNA target sequence
agtgtgaacaaaagttatttg

SEQ ID NO: 300468 - DNA, 21 bp, Artificial sequence
  SiRNA target sequence
gtgtgaacaaaagttatttgg

SEQ ID NO: 300469 - DNA, 21 bp, Artificial sequence
  SiRNA target sequence
tgtgaacaaaagttatttgga

SEQ ID NO: 300470 - DNA, 21 bp, Artificial sequence
  SiRNA target sequence
gtgaacaaaagttatttggaa

SEQ ID NO: 300471 - DNA, 21 bp, Artificial sequence
  SiRNA target sequence
tgaacaaaagttatttggaac

SEQ ID NO: 300472 - DNA, 21 bp, Artificial sequence
  SiRNA target sequence
gaacaaaagttatttggaact

SEQ ID NO: 300473 - DNA, 21 bp, Artificial sequence
  SiRNA target sequence
aacaaaagttatttggaacta

SEQ ID NO: 300474 - DNA, 21 bp, Artificial sequence
  SiRNA target sequence
acaaaagttatttggaactat

SEQ ID NO: 300475 - DNA, 21 bp, Artificial sequence
  SiRNA target sequence
caaaagttatttggaactatt

SEQ ID NO: 300476 - DNA, 21 bp, Artificial sequence
  SiRNA target sequence
aaaagttatttggaactatta

SEQ ID NO: 300477 - DNA, 21 bp, Artificial sequence
  SiRNA target sequence
aaagttatttggaactattag

SEQ ID NO: 300478 - DNA, 21 bp, Artificial sequence
  SiRNA target sequence
aagttatttggaactattagc

SEQ ID NO: 300479 - DNA, 21 bp, Artificial sequence
  SiRNA target sequence
agttatttggaactattagca

SEQ ID NO: 300480 - DNA, 21 bp, Artificial sequence
  SiRNA target sequence
gttatttggaactattagcat

SEQ ID NO: 300481 - DNA, 21 bp, Artificial sequence
  SiRNA target sequence
ttatttggaactattagcatt

SEQ ID NO: 300482 - DNA, 21 bp, Artificial sequence
  SiRNA target sequence
tatttggaactattagcatta

SEQ ID NO: 300483 - DNA, 21 bp, Artificial sequence
  SiRNA target sequence
atttggaactattagcattat

SEQ ID NO: 300484 - DNA, 21 bp, Artificial sequence
  SiRNA target sequence
tttggaactattagcattatt

SEQ ID NO: 300485 - DNA, 21 bp, Artificial sequence
  SiRNA target sequence
ttggaactattagcattattg

SEQ ID NO: 300486 - DNA, 21 bp, Artificial sequence
  SiRNA target sequence
tggaactattagcattattga

SEQ ID NO: 300487 - DNA, 21 bp, Artificial sequence
  SiRNA target sequence
ggaactattagcattattgat

SEQ ID NO: 300488 - DNA, 21 bp, Artificial sequence
  SiRNA target sequence
gaactattagcattattgatg

SEQ ID NO: 300489 - DNA, 21 bp, Artificial sequence
  SiRNA target sequence
aactattagcattattgatgt

SEQ ID NO: 300490 - DNA, 21 bp, Artificial sequence
  SiRNA target sequence
actattagcattattgatgtc

SEQ ID NO: 300491 - DNA, 21 bp, Artificial sequence
  SiRNA target sequence
ctattagcattattgatgtct

SEQ ID NO: 300492 - DNA, 21 bp, Artificial sequence
  SiRNA target sequence
tattagcattattgatgtctg

SEQ ID NO: 300493 - DNA, 21 bp, Artificial sequence
  SiRNA target sequence
attagcattattgatgtctgt

SEQ ID NO: 300494 - DNA, 21 bp, Artificial sequence
  SiRNA target sequence
ttagcattattgatgtctgta

SEQ ID NO: 300495 - DNA, 21 bp, Artificial sequence
  SiRNA target sequence
tagcattattgatgtctgtat

SEQ ID NO: 300496 - DNA, 21 bp, Artificial sequence
  SiRNA target sequence
agcattattgatgtctgtatt

SEQ ID NO: 300497 - DNA, 21 bp, Artificial sequence
  SiRNA target sequence
gcattattgatgtctgtattg

SEQ ID NO: 300498 - DNA, 21 bp, Artificial sequence
  SiRNA target sequence
cattattgatgtctgtattga

SEQ ID NO: 300499 - DNA, 21 bp, Artificial sequence
  SiRNA target sequence
attattgatgtctgtattgat

SEQ ID NO: 300500 - DNA, 21 bp, Artificial sequence
  SiRNA target sequence
ttattgatgtctgtattgata

SEQ ID NO: 300501 - DNA, 21 bp, Artificial sequence
  SiRNA target sequence
tattgatgtctgtattgatat

SEQ ID NO: 300502 - DNA, 21 bp, Artificial sequence
  SiRNA target sequence
attgatgtctgtattgatatc

SEQ ID NO: 300503 - DNA, 21 bp, Artificial sequence
  SiRNA target sequence
ttgatgtctgtattgatatca

SEQ ID NO: 300504 - DNA, 21 bp, Artificial sequence
  SiRNA target sequence
tgatgtctgtattgatatcat

SEQ ID NO: 300505 - DNA, 21 bp, Artificial sequence
  SiRNA target sequence
gatgtctgtattgatatcatt

SEQ ID NO: 300506 - DNA, 21 bp, Artificial sequence
  SiRNA target sequence
atgtctgtattgatatcatta

SEQ ID NO: 300507 - DNA, 21 bp, Artificial sequence
  SiRNA target sequence
tgtctgtattgatatcattag

SEQ ID NO: 300508 - DNA, 21 bp, Artificial sequence
  SiRNA target sequence
gtctgtattgatatcattagt

SEQ ID NO: 300509 - DNA, 21 bp, Artificial sequence
  SiRNA target sequence
tctgtattgatatcattagtg

SEQ ID NO: 300510 - DNA, 21 bp, Artificial sequence
  SiRNA target sequence
ctgtattgatatcattagtgc

SEQ ID NO: 300511 - DNA, 21 bp, Artificial sequence
  SiRNA target sequence
tgtattgatatcattagtgct

SEQ ID NO: 300512 - DNA, 21 bp, Artificial sequence
  SiRNA target sequence
gtattgatatcattagtgctt

SEQ ID NO: 300513 - DNA, 21 bp, Artificial sequence
  SiRNA target sequence
tattgatatcattagtgcttt

SEQ ID NO: 300514 - DNA, 21 bp, Artificial sequence
  SiRNA target sequence
attgatatcattagtgctttg

SEQ ID NO: 300515 - DNA, 21 bp, Artificial sequence
  SiRNA target sequence
ttgatatcattagtgctttgt

SEQ ID NO: 300516 - DNA, 21 bp, Artificial sequence
  SiRNA target sequence
tgatatcattagtgctttgtt

SEQ ID NO: 300517 - DNA, 21 bp, Artificial sequence
  SiRNA target sequence
gatatcattagtgctttgtta

SEQ ID NO: 300518 - DNA, 21 bp, Artificial sequence
  SiRNA target sequence
atatcattagtgctttgttac

SEQ ID NO: 300519 - DNA, 21 bp, Artificial sequence
  SiRNA target sequence
tatcattagtgctttgttaca

SEQ ID NO: 300520 - DNA, 21 bp, Artificial sequence
  SiRNA target sequence
atcattagtgctttgttacaa

SEQ ID NO: 300521 - DNA, 21 bp, Artificial sequence
  SiRNA target sequence
tcattagtgctttgttacaag

SEQ ID NO: 300522 - DNA, 21 bp, Artificial sequence
  SiRNA target sequence
cattagtgctttgttacaagt

SEQ ID NO: 300523 - DNA, 21 bp, Artificial sequence
  SiRNA target sequence
attagtgctttgttacaagta

SEQ ID NO: 300524 - DNA, 21 bp, Artificial sequence
  SiRNA target sequence
ttagtgctttgttacaagtaa

SEQ ID NO: 300525 - DNA, 21 bp, Artificial sequence
  SiRNA target sequence
tagtgctttgttacaagtaag

SEQ ID NO: 300526 - DNA, 21 bp, Artificial sequence
  SiRNA target sequence
agtgctttgttacaagtaagt

SEQ ID NO: 300527 - DNA, 21 bp, Artificial sequence
  SiRNA target sequence
gtgctttgttacaagtaagtt

SEQ ID NO: 300528 - DNA, 21 bp, Artificial sequence
  SiRNA target sequence
tgctttgttacaagtaagttt

SEQ ID NO: 300529 - DNA, 21 bp, Artificial sequence
  SiRNA target sequence
gctttgttacaagtaagtttt

SEQ ID NO: 300530 - DNA, 21 bp, Artificial sequence
  SiRNA target sequence
ctttgttacaagtaagttttg

SEQ ID NO: 300531 - DNA, 21 bp, Artificial sequence
  SiRNA target sequence
tttgttacaagtaagttttgc

SEQ ID NO: 300532 - DNA, 21 bp, Artificial sequence
  SiRNA target sequence
ttgttacaagtaagttttgcg

SEQ ID NO: 300533 - DNA, 21 bp, Artificial sequence
  SiRNA target sequence
tgttacaagtaagttttgcga

SEQ ID NO: 300534 - DNA, 21 bp, Artificial sequence
  SiRNA target sequence
gttacaagtaagttttgcgaa

SEQ ID NO: 300535 - DNA, 21 bp, Artificial sequence
  SiRNA target sequence
ttacaagtaagttttgcgaaa

SEQ ID NO: 300536 - DNA, 21 bp, Artificial sequence
  SiRNA target sequence
tacaagtaagttttgcgaaag

SEQ ID NO: 300537 - DNA, 21 bp, Artificial sequence
  SiRNA target sequence
acaagtaagttttgcgaaagc

SEQ ID NO: 300538 - DNA, 21 bp, Artificial sequence
  SiRNA target sequence
caagtaagttttgcgaaagct

SEQ ID NO: 300539 - DNA, 21 bp, Artificial sequence
  SiRNA target sequence
aagtaagttttgcgaaagctt

SEQ ID NO: 300540 - DNA, 21 bp, Artificial sequence
  SiRNA target sequence
agtaagttttgcgaaagcttc

SEQ ID NO: 300541 - DNA, 21 bp, Artificial sequence
  SiRNA target sequence
gtaagttttgcgaaagcttca

SEQ ID NO: 300542 - DNA, 21 bp, Artificial sequence
  SiRNA target sequence
taagttttgcgaaagcttcaa

SEQ ID NO: 300543 - DNA, 21 bp, Artificial sequence
  SiRNA target sequence
aagttttgcgaaagcttcaat

SEQ ID NO: 300544 - DNA, 21 bp, Artificial sequence
  SiRNA target sequence
agttttgcgaaagcttcaatg

SEQ ID NO: 300545 - DNA, 21 bp, Artificial sequence
  SiRNA target sequence
gttttgcgaaagcttcaatga

SEQ ID NO: 300546 - DNA, 21 bp, Artificial sequence
  SiRNA target sequence
ttttgcgaaagcttcaatgaa

SEQ ID NO: 300547 - DNA, 21 bp, Artificial sequence
  SiRNA target sequence
tttgcgaaagcttcaatgaag

SEQ ID NO: 300548 - DNA, 21 bp, Artificial sequence
  SiRNA target sequence
ttgcgaaagcttcaatgaagt

SEQ ID NO: 300549 - DNA, 21 bp, Artificial sequence
  SiRNA target sequence
tgcgaaagcttcaatgaagtt

SEQ ID NO: 300550 - DNA, 21 bp, Artificial sequence
  SiRNA target sequence
gcgaaagcttcaatgaagtta

SEQ ID NO: 300551 - DNA, 21 bp, Artificial sequence
  SiRNA target sequence
cgaaagcttcaatgaagttag

SEQ ID NO: 300552 - DNA, 21 bp, Artificial sequence
  SiRNA target sequence
gaaagcttcaatgaagttagc

SEQ ID NO: 300553 - DNA, 21 bp, Artificial sequence
  SiRNA target sequence
aaagcttcaatgaagttagct

SEQ ID NO: 300554 - DNA, 21 bp, Artificial sequence
  SiRNA target sequence
aagcttcaatgaagttagctt

SEQ ID NO: 300555 - DNA, 21 bp, Artificial sequence
  SiRNA target sequence
agcttcaatgaagttagcttc

SEQ ID NO: 300556 - DNA, 21 bp, Artificial sequence
  SiRNA target sequence
gcttcaatgaagttagcttct

SEQ ID NO: 300557 - DNA, 21 bp, Artificial sequence
  SiRNA target sequence
cttcaatgaagttagcttctt

SEQ ID NO: 300558 - DNA, 21 bp, Artificial sequence
  SiRNA target sequence
ttcaatgaagttagcttcttt

SEQ ID NO: 300559 - DNA, 21 bp, Artificial sequence
  SiRNA target sequence
tcaatgaagttagcttcttta

SEQ ID NO: 300560 - DNA, 21 bp, Artificial sequence
  SiRNA target sequence
caatgaagttagcttctttag

SEQ ID NO: 300561 - DNA, 21 bp, Artificial sequence
  SiRNA target sequence
aatgaagttagcttctttagc

SEQ ID NO: 300562 - DNA, 21 bp, Artificial sequence
  SiRNA target sequence
atgaagttagcttctttagca

SEQ ID NO: 300563 - DNA, 21 bp, Artificial sequence
  SiRNA target sequence
tgaagttagcttctttagcag

SEQ ID NO: 300564 - DNA, 21 bp, Artificial sequence
  SiRNA target sequence
gaagttagcttctttagcagt

SEQ ID NO: 300565 - DNA, 21 bp, Artificial sequence
  SiRNA target sequence
aagttagcttctttagcagta

SEQ ID NO: 300566 - DNA, 21 bp, Artificial sequence
  SiRNA target sequence
agttagcttctttagcagtag

SEQ ID NO: 300567 - DNA, 21 bp, Artificial sequence
  SiRNA target sequence
gttagcttctttagcagtaga

SEQ ID NO: 300568 - DNA, 21 bp, Artificial sequence
  SiRNA target sequence
ttagcttctttagcagtagaa

SEQ ID NO: 300569 - DNA, 21 bp, Artificial sequence
  SiRNA target sequence
tagcttctttagcagtagaag

SEQ ID NO: 300570 - DNA, 21 bp, Artificial sequence
  SiRNA target sequence
agcttctttagcagtagaagt

SEQ ID NO: 300571 - DNA, 21 bp, Artificial sequence
  SiRNA target sequence
gcttctttagcagtagaagta

SEQ ID NO: 300572 - DNA, 21 bp, Artificial sequence
  SiRNA target sequence
cttctttagcagtagaagtat

SEQ ID NO: 300573 - DNA, 21 bp, Artificial sequence
  SiRNA target sequence
ttctttagcagtagaagtatt

SEQ ID NO: 300574 - DNA, 21 bp, Artificial sequence
  SiRNA target sequence
tctttagcagtagaagtattt

SEQ ID NO: 300575 - DNA, 21 bp, Artificial sequence
  SiRNA target sequence
ctttagcagtagaagtattta

SEQ ID NO: 300576 - DNA, 21 bp, Artificial sequence
  SiRNA target sequence
tttagcagtagaagtatttag

SEQ ID NO: 300577 - DNA, 21 bp, Artificial sequence
  SiRNA target sequence
ttagcagtagaagtatttaga

SEQ ID NO: 300578 - DNA, 21 bp, Artificial sequence
  SiRNA target sequence
tagcagtagaagtatttagat

SEQ ID NO: 300579 - DNA, 21 bp, Artificial sequence
  SiRNA target sequence
agcagtagaagtatttagatt

SEQ ID NO: 300580 - DNA, 21 bp, Artificial sequence
  SiRNA target sequence
gcagtagaagtatttagatta

SEQ ID NO: 300581 - DNA, 21 bp, Artificial sequence
  SiRNA target sequence
cagtagaagtatttagattaa

SEQ ID NO: 300582 - DNA, 21 bp, Artificial sequence
  SiRNA target sequence
agtagaagtatttagattaat

SEQ ID NO: 300583 - DNA, 21 bp, Artificial sequence
  SiRNA target sequence
gtagaagtatttagattaatt

SEQ ID NO: 300584 - DNA, 21 bp, Artificial sequence
  SiRNA target sequence
tagaagtatttagattaatta

SEQ ID NO: 300585 - DNA, 21 bp, Artificial sequence
  SiRNA target sequence
agaagtatttagattaattaa

SEQ ID NO: 300586 - DNA, 21 bp, Artificial sequence
  SiRNA target sequence
gaagtatttagattaattaag

SEQ ID NO: 300587 - DNA, 21 bp, Artificial sequence
  SiRNA target sequence
aagtatttagattaattaaga

SEQ ID NO: 300588 - DNA, 21 bp, Artificial sequence
  SiRNA target sequence
agtatttagattaattaagaa

SEQ ID NO: 300589 - DNA, 21 bp, Artificial sequence
  SiRNA target sequence
gtatttagattaattaagaag

SEQ ID NO: 300590 - DNA, 21 bp, Artificial sequence
  SiRNA target sequence
tatttagattaattaagaagt

SEQ ID NO: 300591 - DNA, 21 bp, Artificial sequence
  SiRNA target sequence
atttagattaattaagaagta

SEQ ID NO: 300592 - DNA, 21 bp, Artificial sequence
  SiRNA target sequence
tttagattaattaagaagtat

SEQ ID NO: 300593 - DNA, 21 bp, Artificial sequence
  SiRNA target sequence
ttagattaattaagaagtatg

SEQ ID NO: 300594 - DNA, 21 bp, Artificial sequence
  SiRNA target sequence
tagattaattaagaagtatgt

SEQ ID NO: 300595 - DNA, 21 bp, Artificial sequence
  SiRNA target sequence
agattaattaagaagtatgta

SEQ ID NO: 300596 - DNA, 21 bp, Artificial sequence
  SiRNA target sequence
gattaattaagaagtatgtag

SEQ ID NO: 300597 - DNA, 21 bp, Artificial sequence
  SiRNA target sequence
attaattaagaagtatgtagg

SEQ ID NO: 300598 - DNA, 21 bp, Artificial sequence
  SiRNA target sequence
ttaattaagaagtatgtaggc

SEQ ID NO: 300599 - DNA, 21 bp, Artificial sequence
  SiRNA target sequence
taattaagaagtatgtaggca

SEQ ID NO: 300600 - DNA, 21 bp, Artificial sequence
  SiRNA target sequence
aattaagaagtatgtaggcag

SEQ ID NO: 300601 - DNA, 21 bp, Artificial sequence
  SiRNA target sequence
attaagaagtatgtaggcagt

SEQ ID NO: 300602 - DNA, 21 bp, Artificial sequence
  SiRNA target sequence
ttaagaagtatgtaggcagtg

SEQ ID NO: 300603 - DNA, 21 bp, Artificial sequence
  SiRNA target sequence
taagaagtatgtaggcagtgt

SEQ ID NO: 300604 - DNA, 21 bp, Artificial sequence
  SiRNA target sequence
aagaagtatgtaggcagtgtt

SEQ ID NO: 300605 - DNA, 21 bp, Artificial sequence
  SiRNA target sequence
agaagtatgtaggcagtgtta

SEQ ID NO: 300606 - DNA, 21 bp, Artificial sequence
  SiRNA target sequence
gaagtatgtaggcagtgttaa

SEQ ID NO: 300607 - DNA, 21 bp, Artificial sequence
  SiRNA target sequence
aagtatgtaggcagtgttaag

SEQ ID NO: 300608 - DNA, 21 bp, Artificial sequence
  SiRNA target sequence
agtatgtaggcagtgttaaga

SEQ ID NO: 300609 - DNA, 21 bp, Artificial sequence
  SiRNA target sequence
gtatgtaggcagtgttaagat

SEQ ID NO: 300610 - DNA, 21 bp, Artificial sequence
  SiRNA target sequence
tatgtaggcagtgttaagatt

SEQ ID NO: 300611 - DNA, 21 bp, Artificial sequence
  SiRNA target sequence
atgtaggcagtgttaagatta

SEQ ID NO: 300612 - DNA, 21 bp, Artificial sequence
  SiRNA target sequence
tgtaggcagtgttaagattaa

SEQ ID NO: 300613 - DNA, 21 bp, Artificial sequence
  SiRNA target sequence
gtaggcagtgttaagattaat

SEQ ID NO: 300614 - DNA, 21 bp, Artificial sequence
  SiRNA target sequence
taggcagtgttaagattaata

SEQ ID NO: 300615 - DNA, 21 bp, Artificial sequence
  SiRNA target sequence
aggcagtgttaagattaatat

SEQ ID NO: 300616 - DNA, 21 bp, Artificial sequence
  SiRNA target sequence
ggcagtgttaagattaatatt

SEQ ID NO: 300617 - DNA, 21 bp, Artificial sequence
  SiRNA target sequence
gcagtgttaagattaatattg

SEQ ID NO: 300618 - DNA, 21 bp, Artificial sequence
  SiRNA target sequence
cagtgttaagattaatattga

SEQ ID NO: 300619 - DNA, 21 bp, Artificial sequence
  SiRNA target sequence
agtgttaagattaatattgat

SEQ ID NO: 300620 - DNA, 21 bp, Artificial sequence
  SiRNA target sequence
gtgttaagattaatattgata

SEQ ID NO: 300621 - DNA, 21 bp, Artificial sequence
  SiRNA target sequence
tgttaagattaatattgataa

SEQ ID NO: 300622 - DNA, 21 bp, Artificial sequence
  SiRNA target sequence
gttaagattaatattgataaa

SEQ ID NO: 300623 - DNA, 21 bp, Artificial sequence
  SiRNA target sequence
ttaagattaatattgataaaa

SEQ ID NO: 300624 - DNA, 21 bp, Artificial sequence
  SiRNA target sequence
taagattaatattgataaaat

SEQ ID NO: 300625 - DNA, 21 bp, Artificial sequence
  SiRNA target sequence
aagattaatattgataaaata

SEQ ID NO: 300626 - DNA, 21 bp, Artificial sequence
  SiRNA target sequence
agattaatattgataaaataa

SEQ ID NO: 300627 - DNA, 21 bp, Artificial sequence
  SiRNA target sequence
gattaatattgataaaataaa

SEQ ID NO: 300628 - DNA, 21 bp, Artificial sequence
  SiRNA target sequence
attaatattgataaaataaag

SEQ ID NO: 300629 - DNA, 21 bp, Artificial sequence
  SiRNA target sequence
ttaatattgataaaataaagg

SEQ ID NO: 300630 - DNA, 21 bp, Artificial sequence
  SiRNA target sequence
taatattgataaaataaagga

SEQ ID NO: 300631 - DNA, 21 bp, Artificial sequence
  SiRNA target sequence
aatattgataaaataaaggag

SEQ ID NO: 300632 - DNA, 21 bp, Artificial sequence
  SiRNA target sequence
atattgataaaataaaggagt

SEQ ID NO: 300633 - DNA, 21 bp, Artificial sequence
  SiRNA target sequence
tattgataaaataaaggagtt

SEQ ID NO: 300634 - DNA, 21 bp, Artificial sequence
  SiRNA target sequence
attgataaaataaaggagttg

SEQ ID NO: 300635 - DNA, 21 bp, Artificial sequence
  SiRNA target sequence
ttgataaaataaaggagttgt

SEQ ID NO: 300636 - DNA, 21 bp, Artificial sequence
  SiRNA target sequence
tgataaaataaaggagttgtt

SEQ ID NO: 300637 - DNA, 21 bp, Artificial sequence
  SiRNA target sequence
gataaaataaaggagttgtta

SEQ ID NO: 300638 - DNA, 21 bp, Artificial sequence
  SiRNA target sequence
ataaaataaaggagttgttaa

SEQ ID NO: 300639 - DNA, 21 bp, Artificial sequence
  SiRNA target sequence
taaaataaaggagttgttaac

SEQ ID NO: 300640 - DNA, 21 bp, Artificial sequence
  SiRNA target sequence
aaaataaaggagttgttaaca

SEQ ID NO: 300641 - DNA, 21 bp, Artificial sequence
  SiRNA target sequence
aaataaaggagttgttaacat

SEQ ID NO: 300642 - DNA, 21 bp, Artificial sequence
  SiRNA target sequence
aataaaggagttgttaacatt

SEQ ID NO: 300643 - DNA, 21 bp, Artificial sequence
  SiRNA target sequence
ataaaggagttgttaacattt

SEQ ID NO: 300644 - DNA, 21 bp, Artificial sequence
  SiRNA target sequence
taaaggagttgttaacatttg

SEQ ID NO: 300645 - DNA, 21 bp, Artificial sequence
  SiRNA target sequence
aaaggagttgttaacatttgg

SEQ ID NO: 300646 - DNA, 21 bp, Artificial sequence
  SiRNA target sequence
aaggagttgttaacatttggt

SEQ ID NO: 300647 - DNA, 21 bp, Artificial sequence
  SiRNA target sequence
aggagttgttaacatttggta

SEQ ID NO: 300648 - DNA, 21 bp, Artificial sequence
  SiRNA target sequence
ggagttgttaacatttggtaa

SEQ ID NO: 300649 - DNA, 21 bp, Artificial sequence
  SiRNA target sequence
gagttgttaacatttggtaag

SEQ ID NO: 300650 - DNA, 21 bp, Artificial sequence
  SiRNA target sequence
agttgttaacatttggtaagc

SEQ ID NO: 300651 - DNA, 21 bp, Artificial sequence
  SiRNA target sequence
gttgttaacatttggtaagca

SEQ ID NO: 300652 - DNA, 21 bp, Artificial sequence
  SiRNA target sequence
ttgttaacatttggtaagcaa

SEQ ID NO: 300653 - DNA, 21 bp, Artificial sequence
  SiRNA target sequence
tgttaacatttggtaagcaag

SEQ ID NO: 300654 - DNA, 21 bp, Artificial sequence
  SiRNA target sequence
gttaacatttggtaagcaagc

SEQ ID NO: 300655 - DNA, 21 bp, Artificial sequence
  SiRNA target sequence
ttaacatttggtaagcaagca

SEQ ID NO: 300656 - DNA, 21 bp, Artificial sequence
  SiRNA target sequence
taacatttggtaagcaagcat

SEQ ID NO: 300657 - DNA, 21 bp, Artificial sequence
  SiRNA target sequence
aacatttggtaagcaagcatt

SEQ ID NO: 300658 - DNA, 21 bp, Artificial sequence
  SiRNA target sequence
acatttggtaagcaagcatta

SEQ ID NO: 300659 - DNA, 21 bp, Artificial sequence
  SiRNA target sequence
catttggtaagcaagcattag

SEQ ID NO: 300660 - DNA, 21 bp, Artificial sequence
  SiRNA target sequence
atttggtaagcaagcattaga

SEQ ID NO: 300661 - DNA, 21 bp, Artificial sequence
  SiRNA target sequence
tttggtaagcaagcattagac

SEQ ID NO: 300662 - DNA, 21 bp, Artificial sequence
  SiRNA target sequence
ttggtaagcaagcattagacg

SEQ ID NO: 300663 - DNA, 21 bp, Artificial sequence
  SiRNA target sequence
tggtaagcaagcattagacgt

SEQ ID NO: 300664 - DNA, 21 bp, Artificial sequence
  SiRNA target sequence
ggtaagcaagcattagacgtg

SEQ ID NO: 300665 - DNA, 21 bp, Artificial sequence
  SiRNA target sequence
gtaagcaagcattagacgtgg

SEQ ID NO: 300666 - DNA, 21 bp, Artificial sequence
  SiRNA target sequence
taagcaagcattagacgtgga

SEQ ID NO: 300667 - DNA, 21 bp, Artificial sequence
  SiRNA target sequence
aagcaagcattagacgtggat

SEQ ID NO: 300668 - DNA, 21 bp, Artificial sequence
  SiRNA target sequence
agcaagcattagacgtggata

SEQ ID NO: 300669 - DNA, 21 bp, Artificial sequence
  SiRNA target sequence
gcaagcattagacgtggataa

SEQ ID NO: 300670 - DNA, 21 bp, Artificial sequence
  SiRNA target sequence
caagcattagacgtggataat

SEQ ID NO: 300671 - DNA, 21 bp, Artificial sequence
  SiRNA target sequence
aagcattagacgtggataatc

SEQ ID NO: 300672 - DNA, 21 bp, Artificial sequence
  SiRNA target sequence
agcattagacgtggataatcc

SEQ ID NO: 300673 - DNA, 21 bp, Artificial sequence
  SiRNA target sequence
gcattagacgtggataatccc

SEQ ID NO: 300674 - DNA, 21 bp, Artificial sequence
  SiRNA target sequence
cattagacgtggataatccca

SEQ ID NO: 300675 - DNA, 21 bp, Artificial sequence
  SiRNA target sequence
attagacgtggataatcccat

SEQ ID NO: 300676 - DNA, 21 bp, Artificial sequence
  SiRNA target sequence
ttagacgtggataatcccatt

SEQ ID NO: 300677 - DNA, 21 bp, Artificial sequence
  SiRNA target sequence
tagacgtggataatcccatta

SEQ ID NO: 300678 - DNA, 21 bp, Artificial sequence
  SiRNA target sequence
agacgtggataatcccattat

SEQ ID NO: 300679 - DNA, 21 bp, Artificial sequence
  SiRNA target sequence
gacgtggataatcccattatt

SEQ ID NO: 300680 - DNA, 21 bp, Artificial sequence
  SiRNA target sequence
acgtggataatcccattattc

SEQ ID NO: 300681 - DNA, 21 bp, Artificial sequence
  SiRNA target sequence
cgtggataatcccattattca

SEQ ID NO: 300682 - DNA, 21 bp, Artificial sequence
  SiRNA target sequence
gtggataatcccattattcaa

SEQ ID NO: 300683 - DNA, 21 bp, Artificial sequence
  SiRNA target sequence
tggataatcccattattcaag

SEQ ID NO: 300684 - DNA, 21 bp, Artificial sequence
  SiRNA target sequence
ggataatcccattattcaagt

SEQ ID NO: 300685 - DNA, 21 bp, Artificial sequence
  SiRNA target sequence
gataatcccattattcaagtt

SEQ ID NO: 300686 - DNA, 21 bp, Artificial sequence
  SiRNA target sequence
ataatcccattattcaagtta

SEQ ID NO: 300687 - DNA, 21 bp, Artificial sequence
  SiRNA target sequence
taatcccattattcaagttaa

SEQ ID NO: 300688 - DNA, 21 bp, Artificial sequence
  SiRNA target sequence
aatcccattattcaagttaaa

SEQ ID NO: 300689 - DNA, 21 bp, Artificial sequence
  SiRNA target sequence
atcccattattcaagttaaaa

SEQ ID NO: 300690 - DNA, 21 bp, Artificial sequence
  SiRNA target sequence
tcccattattcaagttaaaat

SEQ ID NO: 300691 - DNA, 21 bp, Artificial sequence
  SiRNA target sequence
cccattattcaagttaaaatg

SEQ ID NO: 300692 - DNA, 21 bp, Artificial sequence
  SiRNA target sequence
ccattattcaagttaaaatgc

SEQ ID NO: 300693 - DNA, 21 bp, Artificial sequence
  SiRNA target sequence
cattattcaagttaaaatgca

SEQ ID NO: 300694 - DNA, 21 bp, Artificial sequence
  SiRNA target sequence
attattcaagttaaaatgcaa

SEQ ID NO: 300695 - DNA, 21 bp, Artificial sequence
  SiRNA target sequence
ttattcaagttaaaatgcaaa

SEQ ID NO: 300696 - DNA, 21 bp, Artificial sequence
  SiRNA target sequence
tattcaagttaaaatgcaaat

SEQ ID NO: 300697 - DNA, 21 bp, Artificial sequence
  SiRNA target sequence
attcaagttaaaatgcaaatt

SEQ ID NO: 300698 - DNA, 21 bp, Artificial sequence
  SiRNA target sequence
ttcaagttaaaatgcaaattg

SEQ ID NO: 300699 - DNA, 21 bp, Artificial sequence
  SiRNA target sequence
tcaagttaaaatgcaaattga

SEQ ID NO: 300700 - DNA, 21 bp, Artificial sequence
  SiRNA target sequence
caagttaaaatgcaaattgat

SEQ ID NO: 300701 - DNA, 21 bp, Artificial sequence
  SiRNA target sequence
aagttaaaatgcaaattgata

SEQ ID NO: 300702 - DNA, 21 bp, Artificial sequence
  SiRNA target sequence
agttaaaatgcaaattgatat

SEQ ID NO: 300703 - DNA, 21 bp, Artificial sequence
  SiRNA target sequence
gttaaaatgcaaattgatatg

SEQ ID NO: 300704 - DNA, 21 bp, Artificial sequence
  SiRNA target sequence
ttaaaatgcaaattgatatgc

SEQ ID NO: 300705 - DNA, 21 bp, Artificial sequence
  SiRNA target sequence
taaaatgcaaattgatatgcc

SEQ ID NO: 300706 - DNA, 21 bp, Artificial sequence
  SiRNA target sequence
aaaatgcaaattgatatgcca

SEQ ID NO: 300707 - DNA, 21 bp, Artificial sequence
  SiRNA target sequence
aaatgcaaattgatatgccag

SEQ ID NO: 300708 - DNA, 21 bp, Artificial sequence
  SiRNA target sequence
aatgcaaattgatatgccaga

SEQ ID NO: 300709 - DNA, 21 bp, Artificial sequence
  SiRNA target sequence
atgcaaattgatatgccagat

SEQ ID NO: 300710 - DNA, 21 bp, Artificial sequence
  SiRNA target sequence
tgcaaattgatatgccagatt

SEQ ID NO: 300711 - DNA, 21 bp, Artificial sequence
  SiRNA target sequence
gcaaattgatatgccagatta

SEQ ID NO: 300712 - DNA, 21 bp, Artificial sequence
  SiRNA target sequence
caaattgatatgccagattac

SEQ ID NO: 300713 - DNA, 21 bp, Artificial sequence
  SiRNA target sequence
aaattgatatgccagattaca

SEQ ID NO: 300714 - DNA, 21 bp, Artificial sequence
  SiRNA target sequence
aattgatatgccagattacac

SEQ ID NO: 300715 - DNA, 21 bp, Artificial sequence
  SiRNA target sequence
attgatatgccagattacaca

SEQ ID NO: 300716 - DNA, 21 bp, Artificial sequence
  SiRNA target sequence
ttgatatgccagattacacaa

SEQ ID NO: 300717 - DNA, 21 bp, Artificial sequence
  SiRNA target sequence
tgatatgccagattacacaac

SEQ ID NO: 300718 - DNA, 21 bp, Artificial sequence
  SiRNA target sequence
gatatgccagattacacaact

SEQ ID NO: 300719 - DNA, 21 bp, Artificial sequence
  SiRNA target sequence
atatgccagattacacaactc

SEQ ID NO: 300720 - DNA, 21 bp, Artificial sequence
  SiRNA target sequence
tatgccagattacacaactct

SEQ ID NO: 300721 - DNA, 21 bp, Artificial sequence
  SiRNA target sequence
atgccagattacacaactctt

SEQ ID NO: 300722 - DNA, 21 bp, Artificial sequence
  SiRNA target sequence
tgccagattacacaactcttt

SEQ ID NO: 300723 - DNA, 21 bp, Artificial sequence
  SiRNA target sequence
gccagattacacaactctttt

SEQ ID NO: 300724 - DNA, 21 bp, Artificial sequence
  SiRNA target sequence
ccagattacacaactctttta

SEQ ID NO: 300725 - DNA, 21 bp, Artificial sequence
  SiRNA target sequence
cagattacacaactcttttac

SEQ ID NO: 300726 - DNA, 21 bp, Artificial sequence
  SiRNA target sequence
agattacacaactcttttaca

SEQ ID NO: 300727 - DNA, 21 bp, Artificial sequence
  SiRNA target sequence
gattacacaactcttttacaa

SEQ ID NO: 300728 - DNA, 21 bp, Artificial sequence
  SiRNA target sequence
attacacaactcttttacaac

SEQ ID NO: 300729 - DNA, 21 bp, Artificial sequence
  SiRNA target sequence
ttacacaactcttttacaacc

SEQ ID NO: 300730 - DNA, 21 bp, Artificial sequence
  SiRNA target sequence
tacacaactcttttacaaccc

SEQ ID NO: 300731 - DNA, 21 bp, Artificial sequence
  SiRNA target sequence
acacaactcttttacaaccca

SEQ ID NO: 300732 - DNA, 21 bp, Artificial sequence
  SiRNA target sequence
cacaactcttttacaacccaa

SEQ ID NO: 300733 - DNA, 21 bp, Artificial sequence
  SiRNA target sequence
acaactcttttacaacccaat

SEQ ID NO: 300734 - DNA, 21 bp, Artificial sequence
  SiRNA target sequence
caactcttttacaacccaatg

SEQ ID NO: 300735 - DNA, 21 bp, Artificial sequence
  SiRNA target sequence
aactcttttacaacccaatgt

SEQ ID NO: 300736 - DNA, 21 bp, Artificial sequence
  SiRNA target sequence
actcttttacaacccaatgtt

SEQ ID NO: 300737 - DNA, 21 bp, Artificial sequence
  SiRNA target sequence
ctcttttacaacccaatgtta

SEQ ID NO: 300738 - DNA, 21 bp, Artificial sequence
  SiRNA target sequence
tcttttacaacccaatgttat

SEQ ID NO: 300739 - DNA, 21 bp, Artificial sequence
  SiRNA target sequence
cttttacaacccaatgttatt

SEQ ID NO: 300740 - DNA, 21 bp, Artificial sequence
  SiRNA target sequence
ttttacaacccaatgttattg

SEQ ID NO: 300741 - DNA, 21 bp, Artificial sequence
  SiRNA target sequence
tttacaacccaatgttattgt

SEQ ID NO: 300742 - DNA, 21 bp, Artificial sequence
  SiRNA target sequence
ttacaacccaatgttattgtt

SEQ ID NO: 300743 - DNA, 21 bp, Artificial sequence
  SiRNA target sequence
tacaacccaatgttattgtta

SEQ ID NO: 300744 - DNA, 21 bp, Artificial sequence
  SiRNA target sequence
acaacccaatgttattgttag

SEQ ID NO: 300745 - DNA, 21 bp, Artificial sequence
  SiRNA target sequence
caacccaatgttattgttagt

SEQ ID NO: 300746 - DNA, 21 bp, Artificial sequence
  SiRNA target sequence
aacccaatgttattgttagtg

SEQ ID NO: 300747 - DNA, 21 bp, Artificial sequence
  SiRNA target sequence
acccaatgttattgttagtgc

SEQ ID NO: 300748 - DNA, 21 bp, Artificial sequence
  SiRNA target sequence
cccaatgttattgttagtgct

SEQ ID NO: 300749 - DNA, 21 bp, Artificial sequence
  SiRNA target sequence
ccaatgttattgttagtgcta

SEQ ID NO: 300750 - DNA, 21 bp, Artificial sequence
  SiRNA target sequence
caatgttattgttagtgctat

SEQ ID NO: 300751 - DNA, 21 bp, Artificial sequence
  SiRNA target sequence
aatgttattgttagtgctata

SEQ ID NO: 300752 - DNA, 21 bp, Artificial sequence
  SiRNA target sequence
atgttattgttagtgctatat

SEQ ID NO: 300753 - DNA, 21 bp, Artificial sequence
  SiRNA target sequence
tgttattgttagtgctatatt

SEQ ID NO: 300754 - DNA, 21 bp, Artificial sequence
  SiRNA target sequence
gttattgttagtgctatattt

SEQ ID NO: 300755 - DNA, 21 bp, Artificial sequence
  SiRNA target sequence
ttattgttagtgctatatttt

SEQ ID NO: 300756 - DNA, 21 bp, Artificial sequence
  SiRNA target sequence
tattgttagtgctatattttt

SEQ ID NO: 300757 - DNA, 21 bp, Artificial sequence
  SiRNA target sequence
attgttagtgctatattttta

SEQ ID NO: 300758 - DNA, 21 bp, Artificial sequence
  SiRNA target sequence
ttgttagtgctatatttttag

SEQ ID NO: 300759 - DNA, 21 bp, Artificial sequence
  SiRNA target sequence
tgttagtgctatatttttagt

SEQ ID NO: 300760 - DNA, 21 bp, Artificial sequence
  SiRNA target sequence
gttagtgctatatttttagta

SEQ ID NO: 300761 - DNA, 21 bp, Artificial sequence
  SiRNA target sequence
ttagtgctatatttttagtat

SEQ ID NO: 300762 - DNA, 21 bp, Artificial sequence
  SiRNA target sequence
tagtgctatatttttagtatt

SEQ ID NO: 300763 - DNA, 21 bp, Artificial sequence
  SiRNA target sequence
agtgctatatttttagtatta

SEQ ID NO: 300764 - DNA, 21 bp, Artificial sequence
  SiRNA target sequence
gtgctatatttttagtattaa

SEQ ID NO: 300765 - DNA, 21 bp, Artificial sequence
  SiRNA target sequence
tgctatatttttagtattaag

SEQ ID NO: 300766 - DNA, 21 bp, Artificial sequence
  SiRNA target sequence
gctatatttttagtattaagt

SEQ ID NO: 300767 - DNA, 21 bp, Artificial sequence
  SiRNA target sequence
ctatatttttagtattaagtg

SEQ ID NO: 300768 - DNA, 21 bp, Artificial sequence
  SiRNA target sequence
tatatttttagtattaagtgt

SEQ ID NO: 300769 - DNA, 21 bp, Artificial sequence
  SiRNA target sequence
atatttttagtattaagtgtt

SEQ ID NO: 300770 - DNA, 21 bp, Artificial sequence
  SiRNA target sequence
tatttttagtattaagtgtta

SEQ ID NO: 300771 - DNA, 21 bp, Artificial sequence
  SiRNA target sequence
atttttagtattaagtgttat

SEQ ID NO: 300772 - DNA, 21 bp, Artificial sequence
  SiRNA target sequence
tttttagtattaagtgttatt

SEQ ID NO: 300773 - DNA, 21 bp, Artificial sequence
  SiRNA target sequence
ttttagtattaagtgttattt

SEQ ID NO: 300774 - DNA, 21 bp, Artificial sequence
  SiRNA target sequence
tttagtattaagtgttatttt

SEQ ID NO: 300775 - DNA, 21 bp, Artificial sequence
  SiRNA target sequence
ttagtattaagtgttattttc

SEQ ID NO: 300776 - DNA, 21 bp, Artificial sequence
  SiRNA target sequence
tagtattaagtgttattttca

SEQ ID NO: 300777 - DNA, 21 bp, Artificial sequence
  SiRNA target sequence
agtattaagtgttattttcac

SEQ ID NO: 300778 - DNA, 21 bp, Artificial sequence
  SiRNA target sequence
gtattaagtgttattttcacc

SEQ ID NO: 300779 - DNA, 21 bp, Artificial sequence
  SiRNA target sequence
tattaagtgttattttcacca

SEQ ID NO: 300780 - DNA, 21 bp, Artificial sequence
  SiRNA target sequence
attaagtgttattttcaccag

SEQ ID NO: 300781 - DNA, 21 bp, Artificial sequence
  SiRNA target sequence
ttaagtgttattttcaccaga

SEQ ID NO: 300782 - DNA, 21 bp, Artificial sequence
  SiRNA target sequence
taagtgttattttcaccagaa

SEQ ID NO: 300783 - DNA, 21 bp, Artificial sequence
  SiRNA target sequence
aagtgttattttcaccagaac

SEQ ID NO: 300784 - DNA, 21 bp, Artificial sequence
  SiRNA target sequence
agtgttattttcaccagaact

SEQ ID NO: 300785 - DNA, 21 bp, Artificial sequence
  SiRNA target sequence
gtgttattttcaccagaactc

SEQ ID NO: 300786 - DNA, 21 bp, Artificial sequence
  SiRNA target sequence
tgttattttcaccagaactct

SEQ ID NO: 300787 - DNA, 21 bp, Artificial sequence
  SiRNA target sequence
gttattttcaccagaactctt

SEQ ID NO: 300788 - DNA, 21 bp, Artificial sequence
  SiRNA target sequence
ttattttcaccagaactcttc

SEQ ID NO: 300789 - DNA, 21 bp, Artificial sequence
  SiRNA target sequence
tattttcaccagaactcttcc

SEQ ID NO: 300790 - DNA, 21 bp, Artificial sequence
  SiRNA target sequence
attttcaccagaactcttccc

SEQ ID NO: 300791 - DNA, 21 bp, Artificial sequence
  SiRNA target sequence
ttttcaccagaactcttccca

SEQ ID NO: 300792 - DNA, 21 bp, Artificial sequence
  SiRNA target sequence
tttcaccagaactcttcccac

SEQ ID NO: 300793 - DNA, 21 bp, Artificial sequence
  SiRNA target sequence
ttcaccagaactcttcccaca

SEQ ID NO: 300794 - DNA, 21 bp, Artificial sequence
  SiRNA target sequence
tcaccagaactcttcccacaa

SEQ ID NO: 300795 - DNA, 21 bp, Artificial sequence
  SiRNA target sequence
caccagaactcttcccacaaa

SEQ ID NO: 300796 - DNA, 21 bp, Artificial sequence
  SiRNA target sequence
accagaactcttcccacaaaa

SEQ ID NO: 300797 - DNA, 21 bp, Artificial sequence
  SiRNA target sequence
ccagaactcttcccacaaaaa

SEQ ID NO: 300798 - DNA, 21 bp, Artificial sequence
  SiRNA target sequence
cagaactcttcccacaaaaac

SEQ ID NO: 300799 - DNA, 21 bp, Artificial sequence
  SiRNA target sequence
agaactcttcccacaaaaact

SEQ ID NO: 300800 - DNA, 21 bp, Artificial sequence
  SiRNA target sequence
gaactcttcccacaaaaactg

SEQ ID NO: 300801 - DNA, 21 bp, Artificial sequence
  SiRNA target sequence
aactcttcccacaaaaactgg

SEQ ID NO: 300802 - DNA, 21 bp, Artificial sequence
  SiRNA target sequence
actcttcccacaaaaactgga

SEQ ID NO: 300803 - DNA, 21 bp, Artificial sequence
  SiRNA target sequence
ctcttcccacaaaaactggaa

SEQ ID NO: 300804 - DNA, 21 bp, Artificial sequence
  SiRNA target sequence
tcttcccacaaaaactggaat

SEQ ID NO: 300805 - DNA, 21 bp, Artificial sequence
  SiRNA target sequence
cttcccacaaaaactggaatg

SEQ ID NO: 300806 - DNA, 21 bp, Artificial sequence
  SiRNA target sequence
ttcccacaaaaactggaatgg

SEQ ID NO: 300807 - DNA, 21 bp, Artificial sequence
  SiRNA target sequence
tcccacaaaaactggaatgga

SEQ ID NO: 300808 - DNA, 21 bp, Artificial sequence
  SiRNA target sequence
cccacaaaaactggaatggaa

SEQ ID NO: 300809 - DNA, 21 bp, Artificial sequence
  SiRNA target sequence
ccacaaaaactggaatggaag

SEQ ID NO: 300810 - DNA, 21 bp, Artificial sequence
  SiRNA target sequence
cacaaaaactggaatggaagc

SEQ ID NO: 300811 - DNA, 21 bp, Artificial sequence
  SiRNA target sequence
acaaaaactggaatggaagca

SEQ ID NO: 300812 - DNA, 21 bp, Artificial sequence
  SiRNA target sequence
caaaaactggaatggaagcaa

SEQ ID NO: 300813 - DNA, 21 bp, Artificial sequence
  SiRNA target sequence
aaaaactggaatggaagcaat

SEQ ID NO: 300814 - DNA, 21 bp, Artificial sequence
  SiRNA target sequence
aaaactggaatggaagcaatg

SEQ ID NO: 300815 - DNA, 21 bp, Artificial sequence
  SiRNA target sequence
aaactggaatggaagcaatga

SEQ ID NO: 300816 - DNA, 21 bp, Artificial sequence
  SiRNA target sequence
aactggaatggaagcaatgat

SEQ ID NO: 300817 - DNA, 21 bp, Artificial sequence
  SiRNA target sequence
actggaatggaagcaatgata

SEQ ID NO: 300818 - DNA, 21 bp, Artificial sequence
  SiRNA target sequence
ctggaatggaagcaatgataa

SEQ ID NO: 300819 - DNA, 21 bp, Artificial sequence
  SiRNA target sequence
tggaatggaagcaatgataaa

SEQ ID NO: 300820 - DNA, 21 bp, Artificial sequence
  SiRNA target sequence
ggaatggaagcaatgataaaa

SEQ ID NO: 300821 - DNA, 21 bp, Artificial sequence
  SiRNA target sequence
gaatggaagcaatgataaaaa

SEQ ID NO: 300822 - DNA, 21 bp, Artificial sequence
  SiRNA target sequence
aatggaagcaatgataaaaag

SEQ ID NO: 300823 - DNA, 21 bp, Artificial sequence
  SiRNA target sequence
atggaagcaatgataaaaagg

SEQ ID NO: 300824 - DNA, 21 bp, Artificial sequence
  SiRNA target sequence
tggaagcaatgataaaaagga

SEQ ID NO: 300825 - DNA, 21 bp, Artificial sequence
  SiRNA target sequence
ggaagcaatgataaaaaggat

SEQ ID NO: 300826 - DNA, 21 bp, Artificial sequence
  SiRNA target sequence
gaagcaatgataaaaaggatt

SEQ ID NO: 300827 - DNA, 21 bp, Artificial sequence
  SiRNA target sequence
aagcaatgataaaaaggattg

SEQ ID NO: 300828 - DNA, 21 bp, Artificial sequence
  SiRNA target sequence
agcaatgataaaaaggattgg

SEQ ID NO: 300829 - DNA, 21 bp, Artificial sequence
  SiRNA target sequence
gcaatgataaaaaggattgga

SEQ ID NO: 300830 - DNA, 21 bp, Artificial sequence
  SiRNA target sequence
caatgataaaaaggattggag

SEQ ID NO: 300831 - DNA, 21 bp, Artificial sequence
  SiRNA target sequence
aatgataaaaaggattggaga

SEQ ID NO: 300832 - DNA, 21 bp, Artificial sequence
  SiRNA target sequence
atgataaaaaggattggagat

SEQ ID NO: 300833 - DNA, 21 bp, Artificial sequence
  SiRNA target sequence
tgataaaaaggattggagatc

SEQ ID NO: 300834 - DNA, 21 bp, Artificial sequence
  SiRNA target sequence
gataaaaaggattggagatct

SEQ ID NO: 300835 - DNA, 21 bp, Artificial sequence
  SiRNA target sequence
ataaaaaggattggagatcta

SEQ ID NO: 300836 - DNA, 21 bp, Artificial sequence
  SiRNA target sequence
taaaaaggattggagatctag

SEQ ID NO: 300837 - DNA, 21 bp, Artificial sequence
  SiRNA target sequence
aaaaaggattggagatctagg

SEQ ID NO: 300838 - DNA, 21 bp, Artificial sequence
  SiRNA target sequence
aaaaggattggagatctagga

SEQ ID NO: 300839 - DNA, 21 bp, Artificial sequence
  SiRNA target sequence
aaaggattggagatctaggac

SEQ ID NO: 300840 - DNA, 21 bp, Artificial sequence
  SiRNA target sequence
aaggattggagatctaggacg

SEQ ID NO: 300841 - DNA, 21 bp, Artificial sequence
  SiRNA target sequence
aggattggagatctaggacgt

SEQ ID NO: 300842 - DNA, 21 bp, Artificial sequence
  SiRNA target sequence
ggattggagatctaggacgtg

SEQ ID NO: 300843 - DNA, 21 bp, Artificial sequence
  SiRNA target sequence
gattggagatctaggacgtgc

SEQ ID NO: 300844 - DNA, 21 bp, Artificial sequence
  SiRNA target sequence
attggagatctaggacgtgct

SEQ ID NO: 300845 - DNA, 21 bp, Artificial sequence
  SiRNA target sequence
ttggagatctaggacgtgctg

SEQ ID NO: 300846 - DNA, 21 bp, Artificial sequence
  SiRNA target sequence
tggagatctaggacgtgctgc

SEQ ID NO: 300847 - DNA, 21 bp, Artificial sequence
  SiRNA target sequence
ggagatctaggacgtgctgcg

SEQ ID NO: 300848 - DNA, 21 bp, Artificial sequence
  SiRNA target sequence
gagatctaggacgtgctgcga

SEQ ID NO: 300849 - DNA, 21 bp, Artificial sequence
  SiRNA target sequence
agatctaggacgtgctgcgaa

SEQ ID NO: 300850 - DNA, 21 bp, Artificial sequence
  SiRNA target sequence
gatctaggacgtgctgcgaaa

SEQ ID NO: 300851 - DNA, 21 bp, Artificial sequence
  SiRNA target sequence
atctaggacgtgctgcgaaag

SEQ ID NO: 300852 - DNA, 21 bp, Artificial sequence
  SiRNA target sequence
tctaggacgtgctgcgaaagg

SEQ ID NO: 300853 - DNA, 21 bp, Artificial sequence
  SiRNA target sequence
ctaggacgtgctgcgaaaggc

SEQ ID NO: 300854 - DNA, 21 bp, Artificial sequence
  SiRNA target sequence
taggacgtgctgcgaaaggcg

SEQ ID NO: 300855 - DNA, 21 bp, Artificial sequence
  SiRNA target sequence
aggacgtgctgcgaaaggcgt

SEQ ID NO: 300856 - DNA, 21 bp, Artificial sequence
  SiRNA target sequence
ggacgtgctgcgaaaggcgtt

SEQ ID NO: 300857 - DNA, 21 bp, Artificial sequence
  SiRNA target sequence
gacgtgctgcgaaaggcgttt

SEQ ID NO: 300858 - DNA, 21 bp, Artificial sequence
  SiRNA target sequence
acgtgctgcgaaaggcgtttc

SEQ ID NO: 300859 - DNA, 21 bp, Artificial sequence
  SiRNA target sequence
cgtgctgcgaaaggcgtttct

SEQ ID NO: 300860 - DNA, 21 bp, Artificial sequence
  SiRNA target sequence
gtgctgcgaaaggcgtttctg

SEQ ID NO: 300861 - DNA, 21 bp, Artificial sequence
  SiRNA target sequence
tgctgcgaaaggcgtttctga

SEQ ID NO: 300862 - DNA, 21 bp, Artificial sequence
  SiRNA target sequence
gctgcgaaaggcgtttctgat

SEQ ID NO: 300863 - DNA, 21 bp, Artificial sequence
  SiRNA target sequence
ctgcgaaaggcgtttctgatc

SEQ ID NO: 300864 - DNA, 21 bp, Artificial sequence
  SiRNA target sequence
tgcgaaaggcgtttctgatct

SEQ ID NO: 300865 - DNA, 21 bp, Artificial sequence
  SiRNA target sequence
gcgaaaggcgtttctgatctt

SEQ ID NO: 300866 - DNA, 21 bp, Artificial sequence
  SiRNA target sequence
cgaaaggcgtttctgatctta

SEQ ID NO: 300867 - DNA, 21 bp, Artificial sequence
  SiRNA target sequence
gaaaggcgtttctgatcttaa

SEQ ID NO: 300868 - DNA, 21 bp, Artificial sequence
  SiRNA target sequence
aaaggcgtttctgatcttaat

SEQ ID NO: 300869 - DNA, 21 bp, Artificial sequence
  SiRNA target sequence
aaggcgtttctgatcttaatt

SEQ ID NO: 300870 - DNA, 21 bp, Artificial sequence
  SiRNA target sequence
aggcgtttctgatcttaattc

SEQ ID NO: 300871 - DNA, 21 bp, Artificial sequence
  SiRNA target sequence
ggcgtttctgatcttaattct

SEQ ID NO: 300872 - DNA, 21 bp, Artificial sequence
  SiRNA target sequence
gcgtttctgatcttaattctg

SEQ ID NO: 300873 - DNA, 21 bp, Artificial sequence
  SiRNA target sequence
cgtttctgatcttaattctgt

SEQ ID NO: 300874 - DNA, 21 bp, Artificial sequence
  SiRNA target sequence
gtttctgatcttaattctgtt

SEQ ID NO: 300875 - DNA, 21 bp, Artificial sequence
  SiRNA target sequence
tttctgatcttaattctgttt

SEQ ID NO: 300876 - DNA, 21 bp, Artificial sequence
  SiRNA target sequence
ttctgatcttaattctgtttt

SEQ ID NO: 300877 - DNA, 21 bp, Artificial sequence
  SiRNA target sequence
tctgatcttaattctgttttg

SEQ ID NO: 300878 - DNA, 21 bp, Artificial sequence
  SiRNA target sequence
ctgatcttaattctgttttga

SEQ ID NO: 300879 - DNA, 21 bp, Artificial sequence
  SiRNA target sequence
tgatcttaattctgttttgaa

SEQ ID NO: 300880 - DNA, 21 bp, Artificial sequence
  SiRNA target sequence
gatcttaattctgttttgaat

SEQ ID NO: 300881 - DNA, 21 bp, Artificial sequence
  SiRNA target sequence
atcttaattctgttttgaata

SEQ ID NO: 300882 - DNA, 21 bp, Artificial sequence
  SiRNA target sequence
tcttaattctgttttgaataa

SEQ ID NO: 300883 - DNA, 21 bp, Artificial sequence
  SiRNA target sequence
cttaattctgttttgaataat

SEQ ID NO: 300884 - DNA, 21 bp, Artificial sequence
  SiRNA target sequence
ttaattctgttttgaataatt

SEQ ID NO: 300885 - DNA, 21 bp, Artificial sequence
  SiRNA target sequence
taattctgttttgaataattc

SEQ ID NO: 300886 - DNA, 21 bp, Artificial sequence
  SiRNA target sequence
aattctgttttgaataattcc

SEQ ID NO: 300887 - DNA, 21 bp, Artificial sequence
  SiRNA target sequence
attctgttttgaataattcca

SEQ ID NO: 300888 - DNA, 21 bp, Artificial sequence
  SiRNA target sequence
ttctgttttgaataattccat

SEQ ID NO: 300889 - DNA, 21 bp, Artificial sequence
  SiRNA target sequence
tctgttttgaataattccatt

SEQ ID NO: 300890 - DNA, 21 bp, Artificial sequence
  SiRNA target sequence
ctgttttgaataattccattt

SEQ ID NO: 300891 - DNA, 21 bp, Artificial sequence
  SiRNA target sequence
tgttttgaataattccatttc

SEQ ID NO: 300892 - DNA, 21 bp, Artificial sequence
  SiRNA target sequence
gttttgaataattccatttca

SEQ ID NO: 300893 - DNA, 21 bp, Artificial sequence
  SiRNA target sequence
ttttgaataattccatttcaa

SEQ ID NO: 300894 - DNA, 21 bp, Artificial sequence
  SiRNA target sequence
tttgaataattccatttcaac

SEQ ID NO: 300895 - DNA, 21 bp, Artificial sequence
  SiRNA target sequence
ttgaataattccatttcaact

SEQ ID NO: 300896 - DNA, 21 bp, Artificial sequence
  SiRNA target sequence
tgaataattccatttcaacta

SEQ ID NO: 300897 - DNA, 21 bp, Artificial sequence
  SiRNA target sequence
gaataattccatttcaactat

SEQ ID NO: 300898 - DNA, 21 bp, Artificial sequence
  SiRNA target sequence
aataattccatttcaactatg

SEQ ID NO: 300899 - DNA, 21 bp, Artificial sequence
  SiRNA target sequence
ataattccatttcaactatgt

SEQ ID NO: 300900 - DNA, 21 bp, Artificial sequence
  SiRNA target sequence
taattccatttcaactatgtt

SEQ ID NO: 300901 - DNA, 21 bp, Artificial sequence
  SiRNA target sequence
aattccatttcaactatgttg

SEQ ID NO: 300902 - DNA, 21 bp, Artificial sequence
  SiRNA target sequence
attccatttcaactatgttgg

SEQ ID NO: 300903 - DNA, 21 bp, Artificial sequence
  SiRNA target sequence
ttccatttcaactatgttgga

SEQ ID NO: 300904 - DNA, 21 bp, Artificial sequence
  SiRNA target sequence
tccatttcaactatgttggaa

SEQ ID NO: 300905 - DNA, 21 bp, Artificial sequence
  SiRNA target sequence
ccatttcaactatgttggaac

SEQ ID NO: 300906 - DNA, 21 bp, Artificial sequence
  SiRNA target sequence
catttcaactatgttggaaca

SEQ ID NO: 300907 - DNA, 21 bp, Artificial sequence
  SiRNA target sequence
atttcaactatgttggaacat

SEQ ID NO: 300908 - DNA, 21 bp, Artificial sequence
  SiRNA target sequence
tttcaactatgttggaacatt

SEQ ID NO: 300909 - DNA, 21 bp, Artificial sequence
  SiRNA target sequence
ttcaactatgttggaacattt

SEQ ID NO: 300910 - DNA, 21 bp, Artificial sequence
  SiRNA target sequence
tcaactatgttggaacatttt

SEQ ID NO: 300911 - DNA, 21 bp, Artificial sequence
  SiRNA target sequence
caactatgttggaacattttg

SEQ ID NO: 300912 - DNA, 21 bp, Artificial sequence
  SiRNA target sequence
aactatgttggaacattttgg

SEQ ID NO: 300913 - DNA, 21 bp, Artificial sequence
  SiRNA target sequence
actatgttggaacattttggc

SEQ ID NO: 300914 - DNA, 21 bp, Artificial sequence
  SiRNA target sequence
ctatgttggaacattttggcg

SEQ ID NO: 300915 - DNA, 21 bp, Artificial sequence
  SiRNA target sequence
tatgttggaacattttggcgt

SEQ ID NO: 300916 - DNA, 21 bp, Artificial sequence
  SiRNA target sequence
atgttggaacattttggcgtt

SEQ ID NO: 300917 - DNA, 21 bp, Artificial sequence
  SiRNA target sequence
tgttggaacattttggcgttc

SEQ ID NO: 300918 - DNA, 21 bp, Artificial sequence
  SiRNA target sequence
gttggaacattttggcgttca

SEQ ID NO: 300919 - DNA, 21 bp, Artificial sequence
  SiRNA target sequence
ttggaacattttggcgttcat

SEQ ID NO: 300920 - DNA, 21 bp, Artificial sequence
  SiRNA target sequence
tggaacattttggcgttcata

SEQ ID NO: 300921 - DNA, 21 bp, Artificial sequence
  SiRNA target sequence
ggaacattttggcgttcatac

SEQ ID NO: 300922 - DNA, 21 bp, Artificial sequence
  SiRNA target sequence
gaacattttggcgttcatact

SEQ ID NO: 300923 - DNA, 21 bp, Artificial sequence
  SiRNA target sequence
aacattttggcgttcatactt

SEQ ID NO: 300924 - DNA, 21 bp, Artificial sequence
  SiRNA target sequence
acattttggcgttcatacttt

SEQ ID NO: 300925 - DNA, 21 bp, Artificial sequence
  SiRNA target sequence
cattttggcgttcatacttta

SEQ ID NO: 300926 - DNA, 21 bp, Artificial sequence
  SiRNA target sequence
attttggcgttcatactttag

SEQ ID NO: 300927 - DNA, 21 bp, Artificial sequence
  SiRNA target sequence
ttttggcgttcatactttagg

SEQ ID NO: 300928 - DNA, 21 bp, Artificial sequence
  SiRNA target sequence
tttggcgttcatactttaggt

SEQ ID NO: 300929 - DNA, 21 bp, Artificial sequence
  SiRNA target sequence
ttggcgttcatactttaggtt

SEQ ID NO: 300930 - DNA, 21 bp, Artificial sequence
  SiRNA target sequence
tggcgttcatactttaggttt

SEQ ID NO: 300931 - DNA, 21 bp, Artificial sequence
  SiRNA target sequence
ggcgttcatactttaggttta

SEQ ID NO: 300932 - DNA, 21 bp, Artificial sequence
  SiRNA target sequence
gcgttcatactttaggtttaa

SEQ ID NO: 300933 - DNA, 21 bp, Artificial sequence
  SiRNA target sequence
cgttcatactttaggtttaaa

SEQ ID NO: 300934 - DNA, 21 bp, Artificial sequence
  SiRNA target sequence
gttcatactttaggtttaaaa

SEQ ID NO: 300935 - DNA, 21 bp, Artificial sequence
  SiRNA target sequence
ttcatactttaggtttaaaac

SEQ ID NO: 300936 - DNA, 21 bp, Artificial sequence
  SiRNA target sequence
tcatactttaggtttaaaaca

SEQ ID NO: 300937 - DNA, 21 bp, Artificial sequence
  SiRNA target sequence
catactttaggtttaaaacaa

SEQ ID NO: 300938 - DNA, 21 bp, Artificial sequence
  SiRNA target sequence
atactttaggtttaaaacaag

SEQ ID NO: 300939 - DNA, 21 bp, Artificial sequence
  SiRNA target sequence
tactttaggtttaaaacaaga

SEQ ID NO: 300940 - DNA, 21 bp, Artificial sequence
  SiRNA target sequence
actttaggtttaaaacaagag

SEQ ID NO: 300941 - DNA, 21 bp, Artificial sequence
  SiRNA target sequence
ctttaggtttaaaacaagagg

SEQ ID NO: 300942 - DNA, 21 bp, Artificial sequence
  SiRNA target sequence
tttaggtttaaaacaagaggc

SEQ ID NO: 300943 - DNA, 21 bp, Artificial sequence
  SiRNA target sequence
ttaggtttaaaacaagaggca

SEQ ID NO: 300944 - DNA, 21 bp, Artificial sequence
  SiRNA target sequence
taggtttaaaacaagaggcag

SEQ ID NO: 300945 - DNA, 21 bp, Artificial sequence
  SiRNA target sequence
aggtttaaaacaagaggcaga

SEQ ID NO: 300946 - DNA, 21 bp, Artificial sequence
  SiRNA target sequence
ggtttaaaacaagaggcagag

SEQ ID NO: 300947 - DNA, 21 bp, Artificial sequence
  SiRNA target sequence
gtttaaaacaagaggcagagc

SEQ ID NO: 300948 - DNA, 21 bp, Artificial sequence
  SiRNA target sequence
tttaaaacaagaggcagagct

SEQ ID NO: 300949 - DNA, 21 bp, Artificial sequence
  SiRNA target sequence
ttaaaacaagaggcagagctt

SEQ ID NO: 300950 - DNA, 21 bp, Artificial sequence
  SiRNA target sequence
taaaacaagaggcagagcttc

SEQ ID NO: 300951 - DNA, 21 bp, Artificial sequence
  SiRNA target sequence
aaaacaagaggcagagcttca

SEQ ID NO: 300952 - DNA, 21 bp, Artificial sequence
  SiRNA target sequence
aaacaagaggcagagcttcaa

SEQ ID NO: 300953 - DNA, 21 bp, Artificial sequence
  SiRNA target sequence
aacaagaggcagagcttcaac

SEQ ID NO: 300954 - DNA, 21 bp, Artificial sequence
  SiRNA target sequence
acaagaggcagagcttcaact

SEQ ID NO: 300955 - DNA, 21 bp, Artificial sequence
  SiRNA target sequence
caagaggcagagcttcaactt

SEQ ID NO: 300956 - DNA, 21 bp, Artificial sequence
  SiRNA target sequence
aagaggcagagcttcaacttt

SEQ ID NO: 300957 - DNA, 21 bp, Artificial sequence
  SiRNA target sequence
agaggcagagcttcaactttt

SEQ ID NO: 300958 - DNA, 21 bp, Artificial sequence
  SiRNA target sequence
gaggcagagcttcaactttta

SEQ ID NO: 300959 - DNA, 21 bp, Artificial sequence
  SiRNA target sequence
aggcagagcttcaacttttag

SEQ ID NO: 300960 - DNA, 21 bp, Artificial sequence
  SiRNA target sequence
ggcagagcttcaacttttagt

SEQ ID NO: 300961 - DNA, 21 bp, Artificial sequence
  SiRNA target sequence
gcagagcttcaacttttagta

SEQ ID NO: 300962 - DNA, 21 bp, Artificial sequence
  SiRNA target sequence
cagagcttcaacttttagtac

SEQ ID NO: 300963 - DNA, 21 bp, Artificial sequence
  SiRNA target sequence
agagcttcaacttttagtaca

SEQ ID NO: 300964 - DNA, 21 bp, Artificial sequence
  SiRNA target sequence
gagcttcaacttttagtacaa

SEQ ID NO: 300965 - DNA, 21 bp, Artificial sequence
  SiRNA target sequence
agcttcaacttttagtacaag

SEQ ID NO: 300966 - DNA, 21 bp, Artificial sequence
  SiRNA target sequence
gcttcaacttttagtacaagg

SEQ ID NO: 300967 - DNA, 21 bp, Artificial sequence
  SiRNA target sequence
cttcaacttttagtacaaggc

SEQ ID NO: 300968 - DNA, 21 bp, Artificial sequence
  SiRNA target sequence
ttcaacttttagtacaaggct

SEQ ID NO: 300969 - DNA, 21 bp, Artificial sequence
  SiRNA target sequence
tcaacttttagtacaaggcta

SEQ ID NO: 300970 - DNA, 21 bp, Artificial sequence
  SiRNA target sequence
caacttttagtacaaggctat

SEQ ID NO: 300971 - DNA, 21 bp, Artificial sequence
  SiRNA target sequence
aacttttagtacaaggctata

SEQ ID NO: 300972 - DNA, 21 bp, Artificial sequence
  SiRNA target sequence
acttttagtacaaggctataa

SEQ ID NO: 300973 - DNA, 21 bp, Artificial sequence
  SiRNA target sequence
cttttagtacaaggctataag

SEQ ID NO: 300974 - DNA, 21 bp, Artificial sequence
  SiRNA target sequence
ttttagtacaaggctataagg

SEQ ID NO: 300975 - DNA, 21 bp, Artificial sequence
  SiRNA target sequence
tttagtacaaggctataaggc

SEQ ID NO: 300976 - DNA, 21 bp, Artificial sequence
  SiRNA target sequence
ttagtacaaggctataaggcc

SEQ ID NO: 300977 - DNA, 21 bp, Artificial sequence
  SiRNA target sequence
tagtacaaggctataaggcct

SEQ ID NO: 300978 - DNA, 21 bp, Artificial sequence
  SiRNA target sequence
agtacaaggctataaggcctg

SEQ ID NO: 300979 - DNA, 21 bp, Artificial sequence
  SiRNA target sequence
gtacaaggctataaggcctgg

SEQ ID NO: 300980 - DNA, 21 bp, Artificial sequence
  SiRNA target sequence
tacaaggctataaggcctggt

SEQ ID NO: 300981 - DNA, 21 bp, Artificial sequence
  SiRNA target sequence
acaaggctataaggcctggtg

SEQ ID NO: 300982 - DNA, 21 bp, Artificial sequence
  SiRNA target sequence
caaggctataaggcctggtgc

SEQ ID NO: 300983 - DNA, 21 bp, Artificial sequence
  SiRNA target sequence
aaggctataaggcctggtgcg

SEQ ID NO: 300984 - DNA, 21 bp, Artificial sequence
  SiRNA target sequence
aggctataaggcctggtgcga

SEQ ID NO: 300985 - DNA, 21 bp, Artificial sequence
  SiRNA target sequence
ggctataaggcctggtgcgat

SEQ ID NO: 300986 - DNA, 21 bp, Artificial sequence
  SiRNA target sequence
gctataaggcctggtgcgatg

SEQ ID NO: 300987 - DNA, 21 bp, Artificial sequence
  SiRNA target sequence
ctataaggcctggtgcgatga

SEQ ID NO: 300988 - DNA, 21 bp, Artificial sequence
  SiRNA target sequence
tataaggcctggtgcgatgaa

SEQ ID NO: 300989 - DNA, 21 bp, Artificial sequence
  SiRNA target sequence
ataaggcctggtgcgatgaag

SEQ ID NO: 300990 - DNA, 21 bp, Artificial sequence
  SiRNA target sequence
taaggcctggtgcgatgaagt

SEQ ID NO: 300991 - DNA, 21 bp, Artificial sequence
  SiRNA target sequence
aaggcctggtgcgatgaagtg

SEQ ID NO: 300992 - DNA, 21 bp, Artificial sequence
  SiRNA target sequence
aggcctggtgcgatgaagtga

SEQ ID NO: 300993 - DNA, 21 bp, Artificial sequence
  SiRNA target sequence
ggcctggtgcgatgaagtgag

SEQ ID NO: 300994 - DNA, 21 bp, Artificial sequence
  SiRNA target sequence
gcctggtgcgatgaagtgaga

SEQ ID NO: 300995 - DNA, 21 bp, Artificial sequence
  SiRNA target sequence
cctggtgcgatgaagtgagag

SEQ ID NO: 300996 - DNA, 21 bp, Artificial sequence
  SiRNA target sequence
ctggtgcgatgaagtgagagc

SEQ ID NO: 300997 - DNA, 21 bp, Artificial sequence
  SiRNA target sequence
tggtgcgatgaagtgagagct

SEQ ID NO: 300998 - DNA, 21 bp, Artificial sequence
  SiRNA target sequence
ggtgcgatgaagtgagagctc

SEQ ID NO: 300999 - DNA, 21 bp, Artificial sequence
  SiRNA target sequence
gtgcgatgaagtgagagctct

SEQ ID NO: 301000 - DNA, 21 bp, Artificial sequence
  SiRNA target sequence
tgcgatgaagtgagagctcta

SEQ ID NO: 301001 - DNA, 21 bp, Artificial sequence
  SiRNA target sequence
gcgatgaagtgagagctctag

SEQ ID NO: 301002 - DNA, 21 bp, Artificial sequence
  SiRNA target sequence
cgatgaagtgagagctctagt

SEQ ID NO: 301003 - DNA, 21 bp, Artificial sequence
  SiRNA target sequence
gatgaagtgagagctctagta

SEQ ID NO: 301004 - DNA, 21 bp, Artificial sequence
  SiRNA target sequence
atgaagtgagagctctagtag

SEQ ID NO: 301005 - DNA, 21 bp, Artificial sequence
  SiRNA target sequence
tgaagtgagagctctagtagg

SEQ ID NO: 301006 - DNA, 21 bp, Artificial sequence
  SiRNA target sequence
gaagtgagagctctagtagga

SEQ ID NO: 301007 - DNA, 21 bp, Artificial sequence
  SiRNA target sequence
aagtgagagctctagtaggac

SEQ ID NO: 301008 - DNA, 21 bp, Artificial sequence
  SiRNA target sequence
agtgagagctctagtaggaca

SEQ ID NO: 301009 - DNA, 21 bp, Artificial sequence
  SiRNA target sequence
gtgagagctctagtaggacat

SEQ ID NO: 301010 - DNA, 21 bp, Artificial sequence
  SiRNA target sequence
tgagagctctagtaggacata

SEQ ID NO: 301011 - DNA, 21 bp, Artificial sequence
  SiRNA target sequence
gagagctctagtaggacataa

SEQ ID NO: 301012 - DNA, 21 bp, Artificial sequence
  SiRNA target sequence
agagctctagtaggacataag

SEQ ID NO: 301013 - DNA, 21 bp, Artificial sequence
  SiRNA target sequence
gagctctagtaggacataaga

SEQ ID NO: 301014 - DNA, 21 bp, Artificial sequence
  SiRNA target sequence
agctctagtaggacataagat

SEQ ID NO: 301015 - DNA, 21 bp, Artificial sequence
  SiRNA target sequence
gctctagtaggacataagatt

SEQ ID NO: 301016 - DNA, 21 bp, Artificial sequence
  SiRNA target sequence
ctctagtaggacataagatta

SEQ ID NO: 301017 - DNA, 21 bp, Artificial sequence
  SiRNA target sequence
tctagtaggacataagattaa

SEQ ID NO: 301018 - DNA, 21 bp, Artificial sequence
  SiRNA target sequence
ctagtaggacataagattaaa

SEQ ID NO: 301019 - DNA, 21 bp, Artificial sequence
  SiRNA target sequence
tagtaggacataagattaaat

SEQ ID NO: 301020 - DNA, 21 bp, Artificial sequence
  SiRNA target sequence
agtaggacataagattaaatt

SEQ ID NO: 301021 - DNA, 21 bp, Artificial sequence
  SiRNA target sequence
gtaggacataagattaaatta

SEQ ID NO: 301022 - DNA, 21 bp, Artificial sequence
  SiRNA target sequence
taggacataagattaaattag

SEQ ID NO: 301023 - DNA, 21 bp, Artificial sequence
  SiRNA target sequence
aggacataagattaaattaga

SEQ ID NO: 301024 - DNA, 21 bp, Artificial sequence
  SiRNA target sequence
ggacataagattaaattagac

SEQ ID NO: 301025 - DNA, 21 bp, Artificial sequence
  SiRNA target sequence
gacataagattaaattagacg

SEQ ID NO: 301026 - DNA, 21 bp, Artificial sequence
  SiRNA target sequence
acataagattaaattagacgg

SEQ ID NO: 301027 - DNA, 21 bp, Artificial sequence
  SiRNA target sequence
cataagattaaattagacgga

SEQ ID NO: 301028 - DNA, 21 bp, Artificial sequence
  SiRNA target sequence
ataagattaaattagacggag

SEQ ID NO: 301029 - DNA, 21 bp, Artificial sequence
  SiRNA target sequence
taagattaaattagacggaga

SEQ ID NO: 301030 - DNA, 21 bp, Artificial sequence
  SiRNA target sequence
aagattaaattagacggagat

SEQ ID NO: 301031 - DNA, 21 bp, Artificial sequence
  SiRNA target sequence
agattaaattagacggagatt

SEQ ID NO: 301032 - DNA, 21 bp, Artificial sequence
  SiRNA target sequence
gattaaattagacggagattt

SEQ ID NO: 301033 - DNA, 21 bp, Artificial sequence
  SiRNA target sequence
attaaattagacggagatttt

SEQ ID NO: 301034 - DNA, 21 bp, Artificial sequence
  SiRNA target sequence
ttaaattagacggagattttg

SEQ ID NO: 301035 - DNA, 21 bp, Artificial sequence
  SiRNA target sequence
taaattagacggagattttga

SEQ ID NO: 301036 - DNA, 21 bp, Artificial sequence
  SiRNA target sequence
aaattagacggagattttgat

SEQ ID NO: 301037 - DNA, 21 bp, Artificial sequence
  SiRNA target sequence
aattagacggagattttgatg

SEQ ID NO: 301038 - DNA, 21 bp, Artificial sequence
  SiRNA target sequence
attagacggagattttgatgg

SEQ ID NO: 301039 - DNA, 21 bp, Artificial sequence
  SiRNA target sequence
ttagacggagattttgatgga

SEQ ID NO: 301040 - DNA, 21 bp, Artificial sequence
  SiRNA target sequence
tagacggagattttgatggaa

SEQ ID NO: 301041 - DNA, 21 bp, Artificial sequence
  SiRNA target sequence
agacggagattttgatggaaa

SEQ ID NO: 301042 - DNA, 21 bp, Artificial sequence
  SiRNA target sequence
gacggagattttgatggaaaa

SEQ ID NO: 301043 - DNA, 21 bp, Artificial sequence
  SiRNA target sequence
acggagattttgatggaaaaa

SEQ ID NO: 301044 - DNA, 21 bp, Artificial sequence
  SiRNA target sequence
cggagattttgatggaaaaag

SEQ ID NO: 301045 - DNA, 21 bp, Artificial sequence
  SiRNA target sequence
ggagattttgatggaaaaagt

SEQ ID NO: 301046 - DNA, 21 bp, Artificial sequence
  SiRNA target sequence
gagattttgatggaaaaagta

SEQ ID NO: 301047 - DNA, 21 bp, Artificial sequence
  SiRNA target sequence
agattttgatggaaaaagtat

SEQ ID NO: 301048 - DNA, 21 bp, Artificial sequence
  SiRNA target sequence
gattttgatggaaaaagtatt

SEQ ID NO: 301049 - DNA, 21 bp, Artificial sequence
  SiRNA target sequence
attttgatggaaaaagtattg

SEQ ID NO: 301050 - DNA, 21 bp, Artificial sequence
  SiRNA target sequence
ttttgatggaaaaagtattgt

SEQ ID NO: 301051 - DNA, 21 bp, Artificial sequence
  SiRNA target sequence
tttgatggaaaaagtattgtt

SEQ ID NO: 301052 - DNA, 21 bp, Artificial sequence
  SiRNA target sequence
ttgatggaaaaagtattgttg

SEQ ID NO: 301053 - DNA, 21 bp, Artificial sequence
  SiRNA target sequence
tgatggaaaaagtattgttga

SEQ ID NO: 301054 - DNA, 21 bp, Artificial sequence
  SiRNA target sequence
gatggaaaaagtattgttgaa

SEQ ID NO: 301055 - DNA, 21 bp, Artificial sequence
  SiRNA target sequence
atggaaaaagtattgttgaag

SEQ ID NO: 301056 - DNA, 21 bp, Artificial sequence
  SiRNA target sequence
tggaaaaagtattgttgaaga

SEQ ID NO: 301057 - DNA, 21 bp, Artificial sequence
  SiRNA target sequence
ggaaaaagtattgttgaagaa

SEQ ID NO: 301058 - DNA, 21 bp, Artificial sequence
  SiRNA target sequence
gaaaaagtattgttgaagaaa

SEQ ID NO: 301059 - DNA, 21 bp, Artificial sequence
  SiRNA target sequence
aaaaagtattgttgaagaaat

SEQ ID NO: 301060 - DNA, 21 bp, Artificial sequence
  SiRNA target sequence
aaaagtattgttgaagaaata

SEQ ID NO: 301061 - DNA, 21 bp, Artificial sequence
  SiRNA target sequence
aaagtattgttgaagaaataa

SEQ ID NO: 301062 - DNA, 21 bp, Artificial sequence
  SiRNA target sequence
aagtattgttgaagaaataat

SEQ ID NO: 301063 - DNA, 21 bp, Artificial sequence
  SiRNA target sequence
agtattgttgaagaaataatg

SEQ ID NO: 301064 - DNA, 21 bp, Artificial sequence
  SiRNA target sequence
gtattgttgaagaaataatga

SEQ ID NO: 301065 - DNA, 21 bp, Artificial sequence
  SiRNA target sequence
tattgttgaagaaataatgaa

SEQ ID NO: 301066 - DNA, 21 bp, Artificial sequence
  SiRNA target sequence
attgttgaagaaataatgaaa

SEQ ID NO: 301067 - DNA, 21 bp, Artificial sequence
  SiRNA target sequence
ttgttgaagaaataatgaaag

SEQ ID NO: 301068 - DNA, 21 bp, Artificial sequence
  SiRNA target sequence
tgttgaagaaataatgaaaga

SEQ ID NO: 301069 - DNA, 21 bp, Artificial sequence
  SiRNA target sequence
gttgaagaaataatgaaagat

SEQ ID NO: 301070 - DNA, 21 bp, Artificial sequence
  SiRNA target sequence
ttgaagaaataatgaaagatg

SEQ ID NO: 301071 - DNA, 21 bp, Artificial sequence
  SiRNA target sequence
tgaagaaataatgaaagatgt

SEQ ID NO: 301072 - DNA, 21 bp, Artificial sequence
  SiRNA target sequence
gaagaaataatgaaagatgtc

SEQ ID NO: 301073 - DNA, 21 bp, Artificial sequence
  SiRNA target sequence
aagaaataatgaaagatgtcc

SEQ ID NO: 301074 - DNA, 21 bp, Artificial sequence
  SiRNA target sequence
agaaataatgaaagatgtcca

SEQ ID NO: 301075 - DNA, 21 bp, Artificial sequence
  SiRNA target sequence
gaaataatgaaagatgtccac

SEQ ID NO: 301076 - DNA, 21 bp, Artificial sequence
  SiRNA target sequence
aaataatgaaagatgtccacg

SEQ ID NO: 301077 - DNA, 21 bp, Artificial sequence
  SiRNA target sequence
aataatgaaagatgtccacga

SEQ ID NO: 301078 - DNA, 21 bp, Artificial sequence
  SiRNA target sequence
ataatgaaagatgtccacgaa

SEQ ID NO: 301079 - DNA, 21 bp, Artificial sequence
  SiRNA target sequence
taatgaaagatgtccacgaaa

SEQ ID NO: 301080 - DNA, 21 bp, Artificial sequence
  SiRNA target sequence
aatgaaagatgtccacgaaat

SEQ ID NO: 301081 - DNA, 21 bp, Artificial sequence
  SiRNA target sequence
atgaaagatgtccacgaaatt

SEQ ID NO: 301082 - DNA, 21 bp, Artificial sequence
  SiRNA target sequence
tgaaagatgtccacgaaattc

SEQ ID NO: 301083 - DNA, 21 bp, Artificial sequence
  SiRNA target sequence
gaaagatgtccacgaaattca

SEQ ID NO: 301084 - DNA, 21 bp, Artificial sequence
  SiRNA target sequence
aaagatgtccacgaaattcag

SEQ ID NO: 301085 - DNA, 21 bp, Artificial sequence
  SiRNA target sequence
aagatgtccacgaaattcagc

SEQ ID NO: 301086 - DNA, 21 bp, Artificial sequence
  SiRNA target sequence
agatgtccacgaaattcagcg

SEQ ID NO: 301087 - DNA, 21 bp, Artificial sequence
  SiRNA target sequence
gatgtccacgaaattcagcgt

SEQ ID NO: 301088 - DNA, 21 bp, Artificial sequence
  SiRNA target sequence
atgtccacgaaattcagcgtg

SEQ ID NO: 301089 - DNA, 21 bp, Artificial sequence
  SiRNA target sequence
tgtccacgaaattcagcgtgt

SEQ ID NO: 301090 - DNA, 21 bp, Artificial sequence
  SiRNA target sequence
gtccacgaaattcagcgtgta

SEQ ID NO: 301091 - DNA, 21 bp, Artificial sequence
  SiRNA target sequence
tccacgaaattcagcgtgtag

SEQ ID NO: 301092 - DNA, 21 bp, Artificial sequence
  SiRNA target sequence
ccacgaaattcagcgtgtaga

SEQ ID NO: 301093 - DNA, 21 bp, Artificial sequence
  SiRNA target sequence
cacgaaattcagcgtgtagag

SEQ ID NO: 301094 - DNA, 21 bp, Artificial sequence
  SiRNA target sequence
acgaaattcagcgtgtagaga

SEQ ID NO: 301095 - DNA, 21 bp, Artificial sequence
  SiRNA target sequence
cgaaattcagcgtgtagagaa

SEQ ID NO: 301096 - DNA, 21 bp, Artificial sequence
  SiRNA target sequence
gaaattcagcgtgtagagaac

SEQ ID NO: 301097 - DNA, 21 bp, Artificial sequence
  SiRNA target sequence
aaattcagcgtgtagagaacc

SEQ ID NO: 301098 - DNA, 21 bp, Artificial sequence
  SiRNA target sequence
aattcagcgtgtagagaacct

SEQ ID NO: 301099 - DNA, 21 bp, Artificial sequence
  SiRNA target sequence
attcagcgtgtagagaacctc

SEQ ID NO: 301100 - DNA, 21 bp, Artificial sequence
  SiRNA target sequence
ttcagcgtgtagagaacctct

SEQ ID NO: 301101 - DNA, 21 bp, Artificial sequence
  SiRNA target sequence
tcagcgtgtagagaacctcta

SEQ ID NO: 301102 - DNA, 21 bp, Artificial sequence
  SiRNA target sequence
cagcgtgtagagaacctctac

SEQ ID NO: 301103 - DNA, 21 bp, Artificial sequence
  SiRNA target sequence
agcgtgtagagaacctctaca

SEQ ID NO: 301104 - DNA, 21 bp, Artificial sequence
  SiRNA target sequence
gcgtgtagagaacctctacaa

SEQ ID NO: 301105 - DNA, 21 bp, Artificial sequence
  SiRNA target sequence
cgtgtagagaacctctacaag

SEQ ID NO: 301106 - DNA, 21 bp, Artificial sequence
  SiRNA target sequence
gtgtagagaacctctacaagc

SEQ ID NO: 301107 - DNA, 21 bp, Artificial sequence
  SiRNA target sequence
tgtagagaacctctacaagca

SEQ ID NO: 301108 - DNA, 21 bp, Artificial sequence
  SiRNA target sequence
gtagagaacctctacaagcaa

SEQ ID NO: 301109 - DNA, 21 bp, Artificial sequence
  SiRNA target sequence
tagagaacctctacaagcaag

SEQ ID NO: 301110 - DNA, 21 bp, Artificial sequence
  SiRNA target sequence
agagaacctctacaagcaagg

SEQ ID NO: 301111 - DNA, 21 bp, Artificial sequence
  SiRNA target sequence
gagaacctctacaagcaagga

SEQ ID NO: 301112 - DNA, 21 bp, Artificial sequence
  SiRNA target sequence
agaacctctacaagcaaggat

SEQ ID NO: 301113 - DNA, 21 bp, Artificial sequence
  SiRNA target sequence
gaacctctacaagcaaggatt

SEQ ID NO: 301114 - DNA, 21 bp, Artificial sequence
  SiRNA target sequence
aacctctacaagcaaggattg

SEQ ID NO: 301115 - DNA, 21 bp, Artificial sequence
  SiRNA target sequence
acctctacaagcaaggattgg

SEQ ID NO: 301116 - DNA, 21 bp, Artificial sequence
  SiRNA target sequence
cctctacaagcaaggattgga

SEQ ID NO: 301117 - DNA, 21 bp, Artificial sequence
  SiRNA target sequence
ctctacaagcaaggattggac

SEQ ID NO: 301118 - DNA, 21 bp, Artificial sequence
  SiRNA target sequence
tctacaagcaaggattggaca

SEQ ID NO: 301119 - DNA, 21 bp, Artificial sequence
  SiRNA target sequence
ctacaagcaaggattggacat

SEQ ID NO: 301120 - DNA, 21 bp, Artificial sequence
  SiRNA target sequence
tacaagcaaggattggacatt

SEQ ID NO: 301121 - DNA, 21 bp, Artificial sequence
  SiRNA target sequence
acaagcaaggattggacattg

SEQ ID NO: 301122 - DNA, 21 bp, Artificial sequence
  SiRNA target sequence
caagcaaggattggacattgc

SEQ ID NO: 301123 - DNA, 21 bp, Artificial sequence
  SiRNA target sequence
aagcaaggattggacattgct

SEQ ID NO: 301124 - DNA, 21 bp, Artificial sequence
  SiRNA target sequence
agcaaggattggacattgctc

SEQ ID NO: 301125 - DNA, 21 bp, Artificial sequence
  SiRNA target sequence
gcaaggattggacattgctcg

SEQ ID NO: 301126 - DNA, 21 bp, Artificial sequence
  SiRNA target sequence
caaggattggacattgctcgt

SEQ ID NO: 301127 - DNA, 21 bp, Artificial sequence
  SiRNA target sequence
aaggattggacattgctcgta

SEQ ID NO: 301128 - DNA, 21 bp, Artificial sequence
  SiRNA target sequence
aggattggacattgctcgtaa

SEQ ID NO: 301129 - DNA, 21 bp, Artificial sequence
  SiRNA target sequence
ggattggacattgctcgtaat

SEQ ID NO: 301130 - DNA, 21 bp, Artificial sequence
  SiRNA target sequence
gattggacattgctcgtaata

SEQ ID NO: 301131 - DNA, 21 bp, Artificial sequence
  SiRNA target sequence
attggacattgctcgtaatat

SEQ ID NO: 301132 - DNA, 21 bp, Artificial sequence
  SiRNA target sequence
ttggacattgctcgtaatatt

SEQ ID NO: 301133 - DNA, 21 bp, Artificial sequence
  SiRNA target sequence
tggacattgctcgtaatattt

SEQ ID NO: 301134 - DNA, 21 bp, Artificial sequence
  SiRNA target sequence
ggacattgctcgtaatatttc

SEQ ID NO: 301135 - DNA, 21 bp, Artificial sequence
  SiRNA target sequence
gacattgctcgtaatatttct

SEQ ID NO: 301136 - DNA, 21 bp, Artificial sequence
  SiRNA target sequence
acattgctcgtaatatttctg

SEQ ID NO: 301137 - DNA, 21 bp, Artificial sequence
  SiRNA target sequence
cattgctcgtaatatttctga

SEQ ID NO: 301138 - DNA, 21 bp, Artificial sequence
  SiRNA target sequence
attgctcgtaatatttctgat

SEQ ID NO: 301139 - DNA, 21 bp, Artificial sequence
  SiRNA target sequence
ttgctcgtaatatttctgata

SEQ ID NO: 301140 - DNA, 21 bp, Artificial sequence
  SiRNA target sequence
tgctcgtaatatttctgatat

SEQ ID NO: 301141 - DNA, 21 bp, Artificial sequence
  SiRNA target sequence
gctcgtaatatttctgatatg

SEQ ID NO: 301142 - DNA, 21 bp, Artificial sequence
  SiRNA target sequence
ctcgtaatatttctgatatga

SEQ ID NO: 301143 - DNA, 21 bp, Artificial sequence
  SiRNA target sequence
tcgtaatatttctgatatgaa

SEQ ID NO: 301144 - DNA, 21 bp, Artificial sequence
  SiRNA target sequence
cgtaatatttctgatatgaaa

SEQ ID NO: 301145 - DNA, 21 bp, Artificial sequence
  SiRNA target sequence
gtaatatttctgatatgaaac

SEQ ID NO: 301146 - DNA, 21 bp, Artificial sequence
  SiRNA target sequence
taatatttctgatatgaaact

SEQ ID NO: 301147 - DNA, 21 bp, Artificial sequence
  SiRNA target sequence
aatatttctgatatgaaactc

SEQ ID NO: 301148 - DNA, 21 bp, Artificial sequence
  SiRNA target sequence
atatttctgatatgaaactcc

SEQ ID NO: 301149 - DNA, 21 bp, Artificial sequence
  SiRNA target sequence
tatttctgatatgaaactccc

SEQ ID NO: 301150 - DNA, 21 bp, Artificial sequence
  SiRNA target sequence
atttctgatatgaaactccca

SEQ ID NO: 301151 - DNA, 21 bp, Artificial sequence
  SiRNA target sequence
tttctgatatgaaactcccat

SEQ ID NO: 301152 - DNA, 21 bp, Artificial sequence
  SiRNA target sequence
ttctgatatgaaactcccatc

SEQ ID NO: 301153 - DNA, 21 bp, Artificial sequence
  SiRNA target sequence
tctgatatgaaactcccatca

SEQ ID NO: 301154 - DNA, 21 bp, Artificial sequence
  SiRNA target sequence
ctgatatgaaactcccatcaa

SEQ ID NO: 301155 - DNA, 21 bp, Artificial sequence
  SiRNA target sequence
tgatatgaaactcccatcaaa

SEQ ID NO: 301156 - DNA, 21 bp, Artificial sequence
  SiRNA target sequence
gatatgaaactcccatcaaaa

SEQ ID NO: 301157 - DNA, 21 bp, Artificial sequence
  SiRNA target sequence
atatgaaactcccatcaaaat

SEQ ID NO: 301158 - DNA, 21 bp, Artificial sequence
  SiRNA target sequence
tatgaaactcccatcaaaatt

SEQ ID NO: 301159 - DNA, 21 bp, Artificial sequence
  SiRNA target sequence
atgaaactcccatcaaaattg

SEQ ID NO: 301160 - DNA, 21 bp, Artificial sequence
  SiRNA target sequence
tgaaactcccatcaaaattga

SEQ ID NO: 301161 - DNA, 21 bp, Artificial sequence
  SiRNA target sequence
gaaactcccatcaaaattgac

SEQ ID NO: 301162 - DNA, 21 bp, Artificial sequence
  SiRNA target sequence
aaactcccatcaaaattgaca

SEQ ID NO: 301163 - DNA, 21 bp, Artificial sequence
  SiRNA target sequence
aactcccatcaaaattgacaa

SEQ ID NO: 301164 - DNA, 21 bp, Artificial sequence
  SiRNA target sequence
actcccatcaaaattgacaat

SEQ ID NO: 301165 - DNA, 21 bp, Artificial sequence
  SiRNA target sequence
ctcccatcaaaattgacaatt

SEQ ID NO: 301166 - DNA, 21 bp, Artificial sequence
  SiRNA target sequence
tcccatcaaaattgacaatta

SEQ ID NO: 301167 - DNA, 21 bp, Artificial sequence
  SiRNA target sequence
cccatcaaaattgacaattag

SEQ ID NO: 301168 - DNA, 21 bp, Artificial sequence
  SiRNA target sequence
ccatcaaaattgacaattagt

SEQ ID NO: 301169 - DNA, 21 bp, Artificial sequence
  SiRNA target sequence
catcaaaattgacaattagtt

SEQ ID NO: 301170 - DNA, 21 bp, Artificial sequence
  SiRNA target sequence
atcaaaattgacaattagttt

SEQ ID NO: 301171 - DNA, 21 bp, Artificial sequence
  SiRNA target sequence
tcaaaattgacaattagtttt

SEQ ID NO: 301172 - DNA, 21 bp, Artificial sequence
  SiRNA target sequence
caaaattgacaattagtttta

SEQ ID NO: 301173 - DNA, 21 bp, Artificial sequence
  SiRNA target sequence
aaaattgacaattagttttaa

SEQ ID NO: 301174 - DNA, 21 bp, Artificial sequence
  SiRNA target sequence
aaattgacaattagttttaat

SEQ ID NO: 301175 - DNA, 21 bp, Artificial sequence
  SiRNA target sequence
aattgacaattagttttaata

SEQ ID NO: 301176 - DNA, 21 bp, Artificial sequence
  SiRNA target sequence
attgacaattagttttaatac

SEQ ID NO: 301177 - DNA, 21 bp, Artificial sequence
  SiRNA target sequence
ttgacaattagttttaatacc

SEQ ID NO: 301178 - DNA, 21 bp, Artificial sequence
  SiRNA target sequence
tgacaattagttttaataccc

SEQ ID NO: 301179 - DNA, 21 bp, Artificial sequence
  SiRNA target sequence
gacaattagttttaataccca

SEQ ID NO: 301180 - DNA, 21 bp, Artificial sequence
  SiRNA target sequence
acaattagttttaatacccac

SEQ ID NO: 301181 - DNA, 21 bp, Artificial sequence
  SiRNA target sequence
caattagttttaatacccaca

SEQ ID NO: 301182 - DNA, 21 bp, Artificial sequence
  SiRNA target sequence
aattagttttaatacccacat

SEQ ID NO: 301183 - DNA, 21 bp, Artificial sequence
  SiRNA target sequence
attagttttaatacccacatg

SEQ ID NO: 301184 - DNA, 21 bp, Artificial sequence
  SiRNA target sequence
ttagttttaatacccacatga

SEQ ID NO: 301185 - DNA, 21 bp, Artificial sequence
  SiRNA target sequence
tagttttaatacccacatgag

SEQ ID NO: 301186 - DNA, 21 bp, Artificial sequence
  SiRNA target sequence
agttttaatacccacatgaga

SEQ ID NO: 301187 - DNA, 21 bp, Artificial sequence
  SiRNA target sequence
gttttaatacccacatgagat

SEQ ID NO: 301188 - DNA, 21 bp, Artificial sequence
  SiRNA target sequence
ttttaatacccacatgagata

SEQ ID NO: 301189 - DNA, 21 bp, Artificial sequence
  SiRNA target sequence
tttaatacccacatgagatat

SEQ ID NO: 301190 - DNA, 21 bp, Artificial sequence
  SiRNA target sequence
ttaatacccacatgagatatt

SEQ ID NO: 301191 - DNA, 21 bp, Artificial sequence
  SiRNA target sequence
taatacccacatgagatattt

SEQ ID NO: 301192 - DNA, 21 bp, Artificial sequence
  SiRNA target sequence
aatacccacatgagatatttg

SEQ ID NO: 301193 - DNA, 21 bp, Artificial sequence
  SiRNA target sequence
atacccacatgagatatttga

SEQ ID NO: 301194 - DNA, 21 bp, Artificial sequence
  SiRNA target sequence
tacccacatgagatatttgac

SEQ ID NO: 301195 - DNA, 21 bp, Artificial sequence
  SiRNA target sequence
acccacatgagatatttgact

SEQ ID NO: 301196 - DNA, 21 bp, Artificial sequence
  SiRNA target sequence
cccacatgagatatttgactg

SEQ ID NO: 301197 - DNA, 21 bp, Artificial sequence
  SiRNA target sequence
ccacatgagatatttgactga

SEQ ID NO: 301198 - DNA, 21 bp, Artificial sequence
  SiRNA target sequence
cacatgagatatttgactgaa

SEQ ID NO: 301199 - DNA, 21 bp, Artificial sequence
  SiRNA target sequence
acatgagatatttgactgaag

SEQ ID NO: 301200 - DNA, 21 bp, Artificial sequence
  SiRNA target sequence
catgagatatttgactgaagt

SEQ ID NO: 301201 - DNA, 21 bp, Artificial sequence
  SiRNA target sequence
atgagatatttgactgaagtt

SEQ ID NO: 301202 - DNA, 21 bp, Artificial sequence
  SiRNA target sequence
tgagatatttgactgaagttt

SEQ ID NO: 301203 - DNA, 21 bp, Artificial sequence
  SiRNA target sequence
gagatatttgactgaagtttt

SEQ ID NO: 301204 - DNA, 21 bp, Artificial sequence
  SiRNA target sequence
agatatttgactgaagttttc

SEQ ID NO: 301205 - DNA, 21 bp, Artificial sequence
  SiRNA target sequence
gatatttgactgaagttttca

SEQ ID NO: 301206 - DNA, 21 bp, Artificial sequence
  SiRNA target sequence
atatttgactgaagttttcaa

SEQ ID NO: 301207 - DNA, 21 bp, Artificial sequence
  SiRNA target sequence
tatttgactgaagttttcaaa

SEQ ID NO: 301208 - DNA, 21 bp, Artificial sequence
  SiRNA target sequence
atttgactgaagttttcaaag

SEQ ID NO: 301209 - DNA, 21 bp, Artificial sequence
  SiRNA target sequence
tttgactgaagttttcaaagc

SEQ ID NO: 301210 - DNA, 21 bp, Artificial sequence
  SiRNA target sequence
ttgactgaagttttcaaagca

SEQ ID NO: 301211 - DNA, 21 bp, Artificial sequence
  SiRNA target sequence
tgactgaagttttcaaagcag

SEQ ID NO: 301212 - DNA, 21 bp, Artificial sequence
  SiRNA target sequence
gactgaagttttcaaagcagt

SEQ ID NO: 301213 - DNA, 21 bp, Artificial sequence
  SiRNA target sequence
actgaagttttcaaagcagta

SEQ ID NO: 301214 - DNA, 21 bp, Artificial sequence
  SiRNA target sequence
ctgaagttttcaaagcagtag

SEQ ID NO: 301215 - DNA, 21 bp, Artificial sequence
  SiRNA target sequence
tgaagttttcaaagcagtaga

SEQ ID NO: 301216 - DNA, 21 bp, Artificial sequence
  SiRNA target sequence
gaagttttcaaagcagtagac

SEQ ID NO: 301217 - DNA, 21 bp, Artificial sequence
  SiRNA target sequence
aagttttcaaagcagtagaca

SEQ ID NO: 301218 - DNA, 21 bp, Artificial sequence
  SiRNA target sequence
agttttcaaagcagtagacac

SEQ ID NO: 301219 - DNA, 21 bp, Artificial sequence
  SiRNA target sequence
gttttcaaagcagtagacacc

SEQ ID NO: 301220 - DNA, 21 bp, Artificial sequence
  SiRNA target sequence
ttttcaaagcagtagacacct

SEQ ID NO: 301221 - DNA, 21 bp, Artificial sequence
  SiRNA target sequence
tttcaaagcagtagacacctc

SEQ ID NO: 301222 - DNA, 21 bp, Artificial sequence
  SiRNA target sequence
ttcaaagcagtagacacctct

SEQ ID NO: 301223 - DNA, 21 bp, Artificial sequence
  SiRNA target sequence
tcaaagcagtagacacctctg

SEQ ID NO: 301224 - DNA, 21 bp, Artificial sequence
  SiRNA target sequence
caaagcagtagacacctctgg

SEQ ID NO: 301225 - DNA, 21 bp, Artificial sequence
  SiRNA target sequence
aaagcagtagacacctctggc

SEQ ID NO: 301226 - DNA, 21 bp, Artificial sequence
  SiRNA target sequence
aagcagtagacacctctggcg

SEQ ID NO: 301227 - DNA, 21 bp, Artificial sequence
  SiRNA target sequence
agcagtagacacctctggcgc

SEQ ID NO: 301228 - DNA, 21 bp, Artificial sequence
  SiRNA target sequence
gcagtagacacctctggcgcc

SEQ ID NO: 301229 - DNA, 21 bp, Artificial sequence
  SiRNA target sequence
cagtagacacctctggcgcct

SEQ ID NO: 301230 - DNA, 21 bp, Artificial sequence
  SiRNA target sequence
agtagacacctctggcgcctt

SEQ ID NO: 301231 - DNA, 21 bp, Artificial sequence
  SiRNA target sequence
gtagacacctctggcgccttt

SEQ ID NO: 301232 - DNA, 21 bp, Artificial sequence
  SiRNA target sequence
tagacacctctggcgcctttg

SEQ ID NO: 301233 - DNA, 21 bp, Artificial sequence
  SiRNA target sequence
agacacctctggcgcctttgg

SEQ ID NO: 301234 - DNA, 21 bp, Artificial sequence
  SiRNA target sequence
gacacctctggcgcctttgga

SEQ ID NO: 301235 - DNA, 21 bp, Artificial sequence
  SiRNA target sequence
acacctctggcgcctttggaa

SEQ ID NO: 301236 - DNA, 21 bp, Artificial sequence
  SiRNA target sequence
cacctctggcgcctttggaaa

SEQ ID NO: 301237 - DNA, 21 bp, Artificial sequence
  SiRNA target sequence
acctctggcgcctttggaaac

SEQ ID NO: 301238 - DNA, 21 bp, Artificial sequence
  SiRNA target sequence
cctctggcgcctttggaaaca

SEQ ID NO: 301239 - DNA, 21 bp, Artificial sequence
  SiRNA target sequence
ctctggcgcctttggaaacaa

SEQ ID NO: 301240 - DNA, 21 bp, Artificial sequence
  SiRNA target sequence
tctggcgcctttggaaacaaa

SEQ ID NO: 301241 - DNA, 21 bp, Artificial sequence
  SiRNA target sequence
ctggcgcctttggaaacaaac

SEQ ID NO: 301242 - DNA, 21 bp, Artificial sequence
  SiRNA target sequence
tggcgcctttggaaacaaacc

SEQ ID NO: 301243 - DNA, 21 bp, Artificial sequence
  SiRNA target sequence
ggcgcctttggaaacaaacca

SEQ ID NO: 301244 - DNA, 21 bp, Artificial sequence
  SiRNA target sequence
gcgcctttggaaacaaaccac

SEQ ID NO: 301245 - DNA, 21 bp, Artificial sequence
  SiRNA target sequence
cgcctttggaaacaaaccacg

SEQ ID NO: 301246 - DNA, 21 bp, Artificial sequence
  SiRNA target sequence
gcctttggaaacaaaccacgg

SEQ ID NO: 301247 - DNA, 21 bp, Artificial sequence
  SiRNA target sequence
cctttggaaacaaaccacgga

SEQ ID NO: 301248 - DNA, 21 bp, Artificial sequence
  SiRNA target sequence
ctttggaaacaaaccacggac

SEQ ID NO: 301249 - DNA, 21 bp, Artificial sequence
  SiRNA target sequence
tttggaaacaaaccacggact

SEQ ID NO: 301250 - DNA, 21 bp, Artificial sequence
  SiRNA target sequence
ttggaaacaaaccacggactc

SEQ ID NO: 301251 - DNA, 21 bp, Artificial sequence
  SiRNA target sequence
tggaaacaaaccacggactca

SEQ ID NO: 301252 - DNA, 21 bp, Artificial sequence
  SiRNA target sequence
ggaaacaaaccacggactcaa

SEQ ID NO: 301253 - DNA, 21 bp, Artificial sequence
  SiRNA target sequence
gaaacaaaccacggactcaac

SEQ ID NO: 301254 - DNA, 21 bp, Artificial sequence
  SiRNA target sequence
aaacaaaccacggactcaacc

SEQ ID NO: 301255 - DNA, 21 bp, Artificial sequence
  SiRNA target sequence
aacaaaccacggactcaacct

SEQ ID NO: 301256 - DNA, 21 bp, Artificial sequence
  SiRNA target sequence
acaaaccacggactcaacctg

SEQ ID NO: 301257 - DNA, 21 bp, Artificial sequence
  SiRNA target sequence
caaaccacggactcaacctgt

SEQ ID NO: 301258 - DNA, 21 bp, Artificial sequence
  SiRNA target sequence
aaaccacggactcaacctgta

SEQ ID NO: 301259 - DNA, 21 bp, Artificial sequence
  SiRNA target sequence
aaccacggactcaacctgtag

SEQ ID NO: 301260 - DNA, 21 bp, Artificial sequence
  SiRNA target sequence
accacggactcaacctgtagt

SEQ ID NO: 301261 - DNA, 21 bp, Artificial sequence
  SiRNA target sequence
ccacggactcaacctgtagtc

SEQ ID NO: 301262 - DNA, 21 bp, Artificial sequence
  SiRNA target sequence
cacggactcaacctgtagtca

SEQ ID NO: 301263 - DNA, 21 bp, Artificial sequence
  SiRNA target sequence
acggactcaacctgtagtcat

SEQ ID NO: 301264 - DNA, 21 bp, Artificial sequence
  SiRNA target sequence
cggactcaacctgtagtcatt

SEQ ID NO: 301265 - DNA, 21 bp, Artificial sequence
  SiRNA target sequence
ggactcaacctgtagtcattt

SEQ ID NO: 301266 - DNA, 21 bp, Artificial sequence
  SiRNA target sequence
gactcaacctgtagtcatttg

SEQ ID NO: 301267 - DNA, 21 bp, Artificial sequence
  SiRNA target sequence
actcaacctgtagtcatttgg

SEQ ID NO: 301268 - DNA, 21 bp, Artificial sequence
  SiRNA target sequence
ctcaacctgtagtcatttggc

SEQ ID NO: 301269 - DNA, 21 bp, Artificial sequence
  SiRNA target sequence
tcaacctgtagtcatttggct

SEQ ID NO: 301270 - DNA, 21 bp, Artificial sequence
  SiRNA target sequence
caacctgtagtcatttggcta

SEQ ID NO: 301271 - DNA, 21 bp, Artificial sequence
  SiRNA target sequence
aacctgtagtcatttggctat

SEQ ID NO: 301272 - DNA, 21 bp, Artificial sequence
  SiRNA target sequence
acctgtagtcatttggctata

SEQ ID NO: 301273 - DNA, 21 bp, Artificial sequence
  SiRNA target sequence
cctgtagtcatttggctatat

SEQ ID NO: 301274 - DNA, 21 bp, Artificial sequence
  SiRNA target sequence
ctgtagtcatttggctatatg

SEQ ID NO: 301275 - DNA, 21 bp, Artificial sequence
  SiRNA target sequence
tgtagtcatttggctatatgg

SEQ ID NO: 301276 - DNA, 21 bp, Artificial sequence
  SiRNA target sequence
gtagtcatttggctatatggt

SEQ ID NO: 301277 - DNA, 21 bp, Artificial sequence
  SiRNA target sequence
tagtcatttggctatatggtg

SEQ ID NO: 301278 - DNA, 21 bp, Artificial sequence
  SiRNA target sequence
agtcatttggctatatggtga

SEQ ID NO: 301279 - DNA, 21 bp, Artificial sequence
  SiRNA target sequence
gtcatttggctatatggtgag

SEQ ID NO: 301280 - DNA, 21 bp, Artificial sequence
  SiRNA target sequence
tcatttggctatatggtgaga

SEQ ID NO: 301281 - DNA, 21 bp, Artificial sequence
  SiRNA target sequence
catttggctatatggtgagag

SEQ ID NO: 301282 - DNA, 21 bp, Artificial sequence
  SiRNA target sequence
atttggctatatggtgagagt

SEQ ID NO: 301283 - DNA, 21 bp, Artificial sequence
  SiRNA target sequence
tttggctatatggtgagagtg

SEQ ID NO: 301284 - DNA, 21 bp, Artificial sequence
  SiRNA target sequence
ttggctatatggtgagagtgg

SEQ ID NO: 301285 - DNA, 21 bp, Artificial sequence
  SiRNA target sequence
tggctatatggtgagagtgga

SEQ ID NO: 301286 - DNA, 21 bp, Artificial sequence
  SiRNA target sequence
ggctatatggtgagagtggac

SEQ ID NO: 301287 - DNA, 21 bp, Artificial sequence
  SiRNA target sequence
gctatatggtgagagtggacg

SEQ ID NO: 301288 - DNA, 21 bp, Artificial sequence
  SiRNA target sequence
ctatatggtgagagtggacgt

SEQ ID NO: 301289 - DNA, 21 bp, Artificial sequence
  SiRNA target sequence
tatatggtgagagtggacgtg

SEQ ID NO: 301290 - DNA, 21 bp, Artificial sequence
  SiRNA target sequence
atatggtgagagtggacgtgg

SEQ ID NO: 301291 - DNA, 21 bp, Artificial sequence
  SiRNA target sequence
tatggtgagagtggacgtggt

SEQ ID NO: 301292 - DNA, 21 bp, Artificial sequence
  SiRNA target sequence
atggtgagagtggacgtggta

SEQ ID NO: 301293 - DNA, 21 bp, Artificial sequence
  SiRNA target sequence
tggtgagagtggacgtggtaa

SEQ ID NO: 301294 - DNA, 21 bp, Artificial sequence
  SiRNA target sequence
ggtgagagtggacgtggtaag

SEQ ID NO: 301295 - DNA, 21 bp, Artificial sequence
  SiRNA target sequence
gtgagagtggacgtggtaagt

SEQ ID NO: 301296 - DNA, 21 bp, Artificial sequence
  SiRNA target sequence
tgagagtggacgtggtaagtc

SEQ ID NO: 301297 - DNA, 21 bp, Artificial sequence
  SiRNA target sequence
gagagtggacgtggtaagtca

SEQ ID NO: 301298 - DNA, 21 bp, Artificial sequence
  SiRNA target sequence
agagtggacgtggtaagtcag

SEQ ID NO: 301299 - DNA, 21 bp, Artificial sequence
  SiRNA target sequence
gagtggacgtggtaagtcagg

SEQ ID NO: 301300 - DNA, 21 bp, Artificial sequence
  SiRNA target sequence
agtggacgtggtaagtcaggt

SEQ ID NO: 301301 - DNA, 21 bp, Artificial sequence
  SiRNA target sequence
gtggacgtggtaagtcaggta

SEQ ID NO: 301302 - DNA, 21 bp, Artificial sequence
  SiRNA target sequence
tggacgtggtaagtcaggtat

SEQ ID NO: 301303 - DNA, 21 bp, Artificial sequence
  SiRNA target sequence
ggacgtggtaagtcaggtatg

SEQ ID NO: 301304 - DNA, 21 bp, Artificial sequence
  SiRNA target sequence
gacgtggtaagtcaggtatga

SEQ ID NO: 301305 - DNA, 21 bp, Artificial sequence
  SiRNA target sequence
acgtggtaagtcaggtatgac

SEQ ID NO: 301306 - DNA, 21 bp, Artificial sequence
  SiRNA target sequence
cgtggtaagtcaggtatgaca

SEQ ID NO: 301307 - DNA, 21 bp, Artificial sequence
  SiRNA target sequence
gtggtaagtcaggtatgacat

SEQ ID NO: 301308 - DNA, 21 bp, Artificial sequence
  SiRNA target sequence
tggtaagtcaggtatgacatg

SEQ ID NO: 301309 - DNA, 21 bp, Artificial sequence
  SiRNA target sequence
ggtaagtcaggtatgacatgg

SEQ ID NO: 301310 - DNA, 21 bp, Artificial sequence
  SiRNA target sequence
gtaagtcaggtatgacatggc

SEQ ID NO: 301311 - DNA, 21 bp, Artificial sequence
  SiRNA target sequence
taagtcaggtatgacatggcc

SEQ ID NO: 301312 - DNA, 21 bp, Artificial sequence
  SiRNA target sequence
aagtcaggtatgacatggccc

SEQ ID NO: 301313 - DNA, 21 bp, Artificial sequence
  SiRNA target sequence
agtcaggtatgacatggccct

SEQ ID NO: 301314 - DNA, 21 bp, Artificial sequence
  SiRNA target sequence
gtcaggtatgacatggccctt

SEQ ID NO: 301315 - DNA, 21 bp, Artificial sequence
  SiRNA target sequence
tcaggtatgacatggccctta

SEQ ID NO: 301316 - DNA, 21 bp, Artificial sequence
  SiRNA target sequence
caggtatgacatggcccttag

SEQ ID NO: 301317 - DNA, 21 bp, Artificial sequence
  SiRNA target sequence
aggtatgacatggcccttagc

SEQ ID NO: 301318 - DNA, 21 bp, Artificial sequence
  SiRNA target sequence
ggtatgacatggcccttagca

SEQ ID NO: 301319 - DNA, 21 bp, Artificial sequence
  SiRNA target sequence
gtatgacatggcccttagcag

SEQ ID NO: 301320 - DNA, 21 bp, Artificial sequence
  SiRNA target sequence
tatgacatggcccttagcagt

SEQ ID NO: 301321 - DNA, 21 bp, Artificial sequence
  SiRNA target sequence
atgacatggcccttagcagta

SEQ ID NO: 301322 - DNA, 21 bp, Artificial sequence
  SiRNA target sequence
tgacatggcccttagcagtag

SEQ ID NO: 301323 - DNA, 21 bp, Artificial sequence
  SiRNA target sequence
gacatggcccttagcagtaga

SEQ ID NO: 301324 - DNA, 21 bp, Artificial sequence
  SiRNA target sequence
acatggcccttagcagtagat

SEQ ID NO: 301325 - DNA, 21 bp, Artificial sequence
  SiRNA target sequence
catggcccttagcagtagatt

SEQ ID NO: 301326 - DNA, 21 bp, Artificial sequence
  SiRNA target sequence
atggcccttagcagtagattt

SEQ ID NO: 301327 - DNA, 21 bp, Artificial sequence
  SiRNA target sequence
tggcccttagcagtagattta

SEQ ID NO: 301328 - DNA, 21 bp, Artificial sequence
  SiRNA target sequence
ggcccttagcagtagatttaa

SEQ ID NO: 301329 - DNA, 21 bp, Artificial sequence
  SiRNA target sequence
gcccttagcagtagatttaaa

SEQ ID NO: 301330 - DNA, 21 bp, Artificial sequence
  SiRNA target sequence
cccttagcagtagatttaaat

SEQ ID NO: 301331 - DNA, 21 bp, Artificial sequence
  SiRNA target sequence
ccttagcagtagatttaaata

SEQ ID NO: 301332 - DNA, 21 bp, Artificial sequence
  SiRNA target sequence
cttagcagtagatttaaataa

SEQ ID NO: 301333 - DNA, 21 bp, Artificial sequence
  SiRNA target sequence
ttagcagtagatttaaataat

SEQ ID NO: 301334 - DNA, 21 bp, Artificial sequence
  SiRNA target sequence
tagcagtagatttaaataata

SEQ ID NO: 301335 - DNA, 21 bp, Artificial sequence
  SiRNA target sequence
agcagtagatttaaataatag

SEQ ID NO: 301336 - DNA, 21 bp, Artificial sequence
  SiRNA target sequence
gcagtagatttaaataatagt

SEQ ID NO: 301337 - DNA, 21 bp, Artificial sequence
  SiRNA target sequence
cagtagatttaaataatagtt

SEQ ID NO: 301338 - DNA, 21 bp, Artificial sequence
  SiRNA target sequence
agtagatttaaataatagttt

SEQ ID NO: 301339 - DNA, 21 bp, Artificial sequence
  SiRNA target sequence
gtagatttaaataatagttta

SEQ ID NO: 301340 - DNA, 21 bp, Artificial sequence
  SiRNA target sequence
tagatttaaataatagtttat

SEQ ID NO: 301341 - DNA, 21 bp, Artificial sequence
  SiRNA target sequence
agatttaaataatagtttatt

SEQ ID NO: 301342 - DNA, 21 bp, Artificial sequence
  SiRNA target sequence
gatttaaataatagtttatta

SEQ ID NO: 301343 - DNA, 21 bp, Artificial sequence
  SiRNA target sequence
atttaaataatagtttattag

SEQ ID NO: 301344 - DNA, 21 bp, Artificial sequence
  SiRNA target sequence
tttaaataatagtttattaga

SEQ ID NO: 301345 - DNA, 21 bp, Artificial sequence
  SiRNA target sequence
ttaaataatagtttattagat

SEQ ID NO: 301346 - DNA, 21 bp, Artificial sequence
  SiRNA target sequence
taaataatagtttattagatg

SEQ ID NO: 301347 - DNA, 21 bp, Artificial sequence
  SiRNA target sequence
aaataatagtttattagatga

SEQ ID NO: 301348 - DNA, 21 bp, Artificial sequence
  SiRNA target sequence
aataatagtttattagatgat

SEQ ID NO: 301349 - DNA, 21 bp, Artificial sequence
  SiRNA target sequence
ataatagtttattagatgatg

SEQ ID NO: 301350 - DNA, 21 bp, Artificial sequence
  SiRNA target sequence
taatagtttattagatgatgt

SEQ ID NO: 301351 - DNA, 21 bp, Artificial sequence
  SiRNA target sequence
aatagtttattagatgatgtg

SEQ ID NO: 301352 - DNA, 21 bp, Artificial sequence
  SiRNA target sequence
atagtttattagatgatgtga

SEQ ID NO: 301353 - DNA, 21 bp, Artificial sequence
  SiRNA target sequence
tagtttattagatgatgtgac

SEQ ID NO: 301354 - DNA, 21 bp, Artificial sequence
  SiRNA target sequence
agtttattagatgatgtgacg

SEQ ID NO: 301355 - DNA, 21 bp, Artificial sequence
  SiRNA target sequence
gtttattagatgatgtgacgg

SEQ ID NO: 301356 - DNA, 21 bp, Artificial sequence
  SiRNA target sequence
tttattagatgatgtgacgga

SEQ ID NO: 301357 - DNA, 21 bp, Artificial sequence
  SiRNA target sequence
ttattagatgatgtgacggag

SEQ ID NO: 301358 - DNA, 21 bp, Artificial sequence
  SiRNA target sequence
tattagatgatgtgacggaga

SEQ ID NO: 301359 - DNA, 21 bp, Artificial sequence
  SiRNA target sequence
attagatgatgtgacggagat

SEQ ID NO: 301360 - DNA, 21 bp, Artificial sequence
  SiRNA target sequence
ttagatgatgtgacggagatg

SEQ ID NO: 301361 - DNA, 21 bp, Artificial sequence
  SiRNA target sequence
tagatgatgtgacggagatgc

SEQ ID NO: 301362 - DNA, 21 bp, Artificial sequence
  SiRNA target sequence
agatgatgtgacggagatgcg

SEQ ID NO: 301363 - DNA, 21 bp, Artificial sequence
  SiRNA target sequence
gatgatgtgacggagatgcgt

SEQ ID NO: 301364 - DNA, 21 bp, Artificial sequence
  SiRNA target sequence
atgatgtgacggagatgcgta

SEQ ID NO: 301365 - DNA, 21 bp, Artificial sequence
  SiRNA target sequence
tgatgtgacggagatgcgtaa

SEQ ID NO: 301366 - DNA, 21 bp, Artificial sequence
  SiRNA target sequence
gatgtgacggagatgcgtaac

SEQ ID NO: 301367 - DNA, 21 bp, Artificial sequence
  SiRNA target sequence
atgtgacggagatgcgtaact

SEQ ID NO: 301368 - DNA, 21 bp, Artificial sequence
  SiRNA target sequence
tgtgacggagatgcgtaactt

SEQ ID NO: 301369 - DNA, 21 bp, Artificial sequence
  SiRNA target sequence
gtgacggagatgcgtaacttt

SEQ ID NO: 301370 - DNA, 21 bp, Artificial sequence
  SiRNA target sequence
tgacggagatgcgtaactttt

SEQ ID NO: 301371 - DNA, 21 bp, Artificial sequence
  SiRNA target sequence
gacggagatgcgtaacttttc

SEQ ID NO: 301372 - DNA, 21 bp, Artificial sequence
  SiRNA target sequence
acggagatgcgtaacttttcc

SEQ ID NO: 301373 - DNA, 21 bp, Artificial sequence
  SiRNA target sequence
cggagatgcgtaacttttcca

SEQ ID NO: 301374 - DNA, 21 bp, Artificial sequence
  SiRNA target sequence
ggagatgcgtaacttttccaa

SEQ ID NO: 301375 - DNA, 21 bp, Artificial sequence
  SiRNA target sequence
gagatgcgtaacttttccaag

SEQ ID NO: 301376 - DNA, 21 bp, Artificial sequence
  SiRNA target sequence
agatgcgtaacttttccaaga

SEQ ID NO: 301377 - DNA, 21 bp, Artificial sequence
  SiRNA target sequence
gatgcgtaacttttccaagaa

SEQ ID NO: 301378 - DNA, 21 bp, Artificial sequence
  SiRNA target sequence
atgcgtaacttttccaagaat

SEQ ID NO: 301379 - DNA, 21 bp, Artificial sequence
  SiRNA target sequence
tgcgtaacttttccaagaata

SEQ ID NO: 301380 - DNA, 21 bp, Artificial sequence
  SiRNA target sequence
gcgtaacttttccaagaatat

SEQ ID NO: 301381 - DNA, 21 bp, Artificial sequence
  SiRNA target sequence
cgtaacttttccaagaatatc

SEQ ID NO: 301382 - DNA, 21 bp, Artificial sequence
  SiRNA target sequence
gtaacttttccaagaatatct

SEQ ID NO: 301383 - DNA, 21 bp, Artificial sequence
  SiRNA target sequence
taacttttccaagaatatcta

SEQ ID NO: 301384 - DNA, 21 bp, Artificial sequence
  SiRNA target sequence
aacttttccaagaatatctac

SEQ ID NO: 301385 - DNA, 21 bp, Artificial sequence
  SiRNA target sequence
acttttccaagaatatctaca

SEQ ID NO: 301386 - DNA, 21 bp, Artificial sequence
  SiRNA target sequence
cttttccaagaatatctacat

SEQ ID NO: 301387 - DNA, 21 bp, Artificial sequence
  SiRNA target sequence
ttttccaagaatatctacatg

SEQ ID NO: 301388 - DNA, 21 bp, Artificial sequence
  SiRNA target sequence
tttccaagaatatctacatga

SEQ ID NO: 301389 - DNA, 21 bp, Artificial sequence
  SiRNA target sequence
ttccaagaatatctacatgag

SEQ ID NO: 301390 - DNA, 21 bp, Artificial sequence
  SiRNA target sequence
tccaagaatatctacatgaga

SEQ ID NO: 301391 - DNA, 21 bp, Artificial sequence
  SiRNA target sequence
ccaagaatatctacatgagaa

SEQ ID NO: 301392 - DNA, 21 bp, Artificial sequence
  SiRNA target sequence
caagaatatctacatgagaaa

SEQ ID NO: 301393 - DNA, 21 bp, Artificial sequence
  SiRNA target sequence
aagaatatctacatgagaaat

SEQ ID NO: 301394 - DNA, 21 bp, Artificial sequence
  SiRNA target sequence
agaatatctacatgagaaatg

SEQ ID NO: 301395 - DNA, 21 bp, Artificial sequence
  SiRNA target sequence
gaatatctacatgagaaatgt

SEQ ID NO: 301396 - DNA, 21 bp, Artificial sequence
  SiRNA target sequence
aatatctacatgagaaatgta

SEQ ID NO: 301397 - DNA, 21 bp, Artificial sequence
  SiRNA target sequence
atatctacatgagaaatgtag

SEQ ID NO: 301398 - DNA, 21 bp, Artificial sequence
  SiRNA target sequence
tatctacatgagaaatgtaga

SEQ ID NO: 301399 - DNA, 21 bp, Artificial sequence
  SiRNA target sequence
atctacatgagaaatgtagaa

SEQ ID NO: 301400 - DNA, 21 bp, Artificial sequence
  SiRNA target sequence
tctacatgagaaatgtagaac

SEQ ID NO: 301401 - DNA, 21 bp, Artificial sequence
  SiRNA target sequence
ctacatgagaaatgtagaaca

SEQ ID NO: 301402 - DNA, 21 bp, Artificial sequence
  SiRNA target sequence
tacatgagaaatgtagaacag

SEQ ID NO: 301403 - DNA, 21 bp, Artificial sequence
  SiRNA target sequence
acatgagaaatgtagaacagg

SEQ ID NO: 301404 - DNA, 21 bp, Artificial sequence
  SiRNA target sequence
catgagaaatgtagaacagga

SEQ ID NO: 301405 - DNA, 21 bp, Artificial sequence
  SiRNA target sequence
atgagaaatgtagaacaggaa

SEQ ID NO: 301406 - DNA, 21 bp, Artificial sequence
  SiRNA target sequence
tgagaaatgtagaacaggaat

SEQ ID NO: 301407 - DNA, 21 bp, Artificial sequence
  SiRNA target sequence
gagaaatgtagaacaggaatt

SEQ ID NO: 301408 - DNA, 21 bp, Artificial sequence
  SiRNA target sequence
agaaatgtagaacaggaattt

SEQ ID NO: 301409 - DNA, 21 bp, Artificial sequence
  SiRNA target sequence
gaaatgtagaacaggaatttt

SEQ ID NO: 301410 - DNA, 21 bp, Artificial sequence
  SiRNA target sequence
aaatgtagaacaggaattttg

SEQ ID NO: 301411 - DNA, 21 bp, Artificial sequence
  SiRNA target sequence
aatgtagaacaggaattttgg

SEQ ID NO: 301412 - DNA, 21 bp, Artificial sequence
  SiRNA target sequence
atgtagaacaggaattttggg

SEQ ID NO: 301413 - DNA, 21 bp, Artificial sequence
  SiRNA target sequence
tgtagaacaggaattttggga

SEQ ID NO: 301414 - DNA, 21 bp, Artificial sequence
  SiRNA target sequence
gtagaacaggaattttgggat

SEQ ID NO: 301415 - DNA, 21 bp, Artificial sequence
  SiRNA target sequence
tagaacaggaattttgggata

SEQ ID NO: 301416 - DNA, 21 bp, Artificial sequence
  SiRNA target sequence
agaacaggaattttgggataa

SEQ ID NO: 301417 - DNA, 21 bp, Artificial sequence
  SiRNA target sequence
gaacaggaattttgggataat

SEQ ID NO: 301418 - DNA, 21 bp, Artificial sequence
  SiRNA target sequence
aacaggaattttgggataatt

SEQ ID NO: 301419 - DNA, 21 bp, Artificial sequence
  SiRNA target sequence
acaggaattttgggataatta

SEQ ID NO: 301420 - DNA, 21 bp, Artificial sequence
  SiRNA target sequence
caggaattttgggataattat

SEQ ID NO: 301421 - DNA, 21 bp, Artificial sequence
  SiRNA target sequence
aggaattttgggataattatc

SEQ ID NO: 301422 - DNA, 21 bp, Artificial sequence
  SiRNA target sequence
ggaattttgggataattatca

SEQ ID NO: 301423 - DNA, 21 bp, Artificial sequence
  SiRNA target sequence
gaattttgggataattatcaa

SEQ ID NO: 301424 - DNA, 21 bp, Artificial sequence
  SiRNA target sequence
aattttgggataattatcaag

SEQ ID NO: 301425 - DNA, 21 bp, Artificial sequence
  SiRNA target sequence
attttgggataattatcaagg

SEQ ID NO: 301426 - DNA, 21 bp, Artificial sequence
  SiRNA target sequence
ttttgggataattatcaagga

SEQ ID NO: 301427 - DNA, 21 bp, Artificial sequence
  SiRNA target sequence
tttgggataattatcaaggac

SEQ ID NO: 301428 - DNA, 21 bp, Artificial sequence
  SiRNA target sequence
ttgggataattatcaaggaca

SEQ ID NO: 301429 - DNA, 21 bp, Artificial sequence
  SiRNA target sequence
tgggataattatcaaggacaa

SEQ ID NO: 301430 - DNA, 21 bp, Artificial sequence
  SiRNA target sequence
gggataattatcaaggacaaa

SEQ ID NO: 301431 - DNA, 21 bp, Artificial sequence
  SiRNA target sequence
ggataattatcaaggacaaaa

SEQ ID NO: 301432 - DNA, 21 bp, Artificial sequence
  SiRNA target sequence
gataattatcaaggacaaaat

SEQ ID NO: 301433 - DNA, 21 bp, Artificial sequence
  SiRNA target sequence
ataattatcaaggacaaaata

SEQ ID NO: 301434 - DNA, 21 bp, Artificial sequence
  SiRNA target sequence
taattatcaaggacaaaatat

SEQ ID NO: 301435 - DNA, 21 bp, Artificial sequence
  SiRNA target sequence
aattatcaaggacaaaatatc

SEQ ID NO: 301436 - DNA, 21 bp, Artificial sequence
  SiRNA target sequence
attatcaaggacaaaatatcg

SEQ ID NO: 301437 - DNA, 21 bp, Artificial sequence
  SiRNA target sequence
ttatcaaggacaaaatatcgt

SEQ ID NO: 301438 - DNA, 21 bp, Artificial sequence
  SiRNA target sequence
tatcaaggacaaaatatcgta

SEQ ID NO: 301439 - DNA, 21 bp, Artificial sequence
  SiRNA target sequence
atcaaggacaaaatatcgtag

SEQ ID NO: 301440 - DNA, 21 bp, Artificial sequence
  SiRNA target sequence
tcaaggacaaaatatcgtagt

SEQ ID NO: 301441 - DNA, 21 bp, Artificial sequence
  SiRNA target sequence
caaggacaaaatatcgtagtt

SEQ ID NO: 301442 - DNA, 21 bp, Artificial sequence
  SiRNA target sequence
aaggacaaaatatcgtagttt

SEQ ID NO: 301443 - DNA, 21 bp, Artificial sequence
  SiRNA target sequence
aggacaaaatatcgtagttta

SEQ ID NO: 301444 - DNA, 21 bp, Artificial sequence
  SiRNA target sequence
ggacaaaatatcgtagtttac

SEQ ID NO: 301445 - DNA, 21 bp, Artificial sequence
  SiRNA target sequence
gacaaaatatcgtagtttacg

SEQ ID NO: 301446 - DNA, 21 bp, Artificial sequence
  SiRNA target sequence
acaaaatatcgtagtttacga

SEQ ID NO: 301447 - DNA, 21 bp, Artificial sequence
  SiRNA target sequence
caaaatatcgtagtttacgat

SEQ ID NO: 301448 - DNA, 21 bp, Artificial sequence
  SiRNA target sequence
aaaatatcgtagtttacgatg

SEQ ID NO: 301449 - DNA, 21 bp, Artificial sequence
  SiRNA target sequence
aaatatcgtagtttacgatga

SEQ ID NO: 301450 - DNA, 21 bp, Artificial sequence
  SiRNA target sequence
aatatcgtagtttacgatgat

SEQ ID NO: 301451 - DNA, 21 bp, Artificial sequence
  SiRNA target sequence
atatcgtagtttacgatgatt

SEQ ID NO: 301452 - DNA, 21 bp, Artificial sequence
  SiRNA target sequence
tatcgtagtttacgatgattt

SEQ ID NO: 301453 - DNA, 21 bp, Artificial sequence
  SiRNA target sequence
atcgtagtttacgatgatttt

SEQ ID NO: 301454 - DNA, 21 bp, Artificial sequence
  SiRNA target sequence
tcgtagtttacgatgattttg

SEQ ID NO: 301455 - DNA, 21 bp, Artificial sequence
  SiRNA target sequence
cgtagtttacgatgattttgg

SEQ ID NO: 301456 - DNA, 21 bp, Artificial sequence
  SiRNA target sequence
gtagtttacgatgattttgga

SEQ ID NO: 301457 - DNA, 21 bp, Artificial sequence
  SiRNA target sequence
tagtttacgatgattttggac

SEQ ID NO: 301458 - DNA, 21 bp, Artificial sequence
  SiRNA target sequence
agtttacgatgattttggaca

SEQ ID NO: 301459 - DNA, 21 bp, Artificial sequence
  SiRNA target sequence
gtttacgatgattttggacaa

SEQ ID NO: 301460 - DNA, 21 bp, Artificial sequence
  SiRNA target sequence
tttacgatgattttggacaaa

SEQ ID NO: 301461 - DNA, 21 bp, Artificial sequence
  SiRNA target sequence
ttacgatgattttggacaaat

SEQ ID NO: 301462 - DNA, 21 bp, Artificial sequence
  SiRNA target sequence
tacgatgattttggacaaatg

SEQ ID NO: 301463 - DNA, 21 bp, Artificial sequence
  SiRNA target sequence
acgatgattttggacaaatga

SEQ ID NO: 301464 - DNA, 21 bp, Artificial sequence
  SiRNA target sequence
cgatgattttggacaaatgag

SEQ ID NO: 301465 - DNA, 21 bp, Artificial sequence
  SiRNA target sequence
gatgattttggacaaatgaga

SEQ ID NO: 301466 - DNA, 21 bp, Artificial sequence
  SiRNA target sequence
atgattttggacaaatgagag

SEQ ID NO: 301467 - DNA, 21 bp, Artificial sequence
  SiRNA target sequence
tgattttggacaaatgagaga

SEQ ID NO: 301468 - DNA, 21 bp, Artificial sequence
  SiRNA target sequence
gattttggacaaatgagagat

SEQ ID NO: 301469 - DNA, 21 bp, Artificial sequence
  SiRNA target sequence
attttggacaaatgagagatt

SEQ ID NO: 301470 - DNA, 21 bp, Artificial sequence
  SiRNA target sequence
ttttggacaaatgagagattc

SEQ ID NO: 301471 - DNA, 21 bp, Artificial sequence
  SiRNA target sequence
tttggacaaatgagagattca

SEQ ID NO: 301472 - DNA, 21 bp, Artificial sequence
  SiRNA target sequence
ttggacaaatgagagattcaa

SEQ ID NO: 301473 - DNA, 21 bp, Artificial sequence
  SiRNA target sequence
tggacaaatgagagattcaac

SEQ ID NO: 301474 - DNA, 21 bp, Artificial sequence
  SiRNA target sequence
ggacaaatgagagattcaaca

SEQ ID NO: 301475 - DNA, 21 bp, Artificial sequence
  SiRNA target sequence
gacaaatgagagattcaacag

SEQ ID NO: 301476 - DNA, 21 bp, Artificial sequence
  SiRNA target sequence
acaaatgagagattcaacagc

SEQ ID NO: 301477 - DNA, 21 bp, Artificial sequence
  SiRNA target sequence
caaatgagagattcaacagct

SEQ ID NO: 301478 - DNA, 21 bp, Artificial sequence
  SiRNA target sequence
aaatgagagattcaacagcta

SEQ ID NO: 301479 - DNA, 21 bp, Artificial sequence
  SiRNA target sequence
aatgagagattcaacagctaa

SEQ ID NO: 301480 - DNA, 21 bp, Artificial sequence
  SiRNA target sequence
atgagagattcaacagctaac

SEQ ID NO: 301481 - DNA, 21 bp, Artificial sequence
  SiRNA target sequence
tgagagattcaacagctaacc

SEQ ID NO: 301482 - DNA, 21 bp, Artificial sequence
  SiRNA target sequence
gagagattcaacagctaaccc

SEQ ID NO: 301483 - DNA, 21 bp, Artificial sequence
  SiRNA target sequence
agagattcaacagctaaccca

SEQ ID NO: 301484 - DNA, 21 bp, Artificial sequence
  SiRNA target sequence
gagattcaacagctaacccaa

SEQ ID NO: 301485 - DNA, 21 bp, Artificial sequence
  SiRNA target sequence
agattcaacagctaacccaaa

SEQ ID NO: 301486 - DNA, 21 bp, Artificial sequence
  SiRNA target sequence
gattcaacagctaacccaaac

SEQ ID NO: 301487 - DNA, 21 bp, Artificial sequence
  SiRNA target sequence
attcaacagctaacccaaacc

SEQ ID NO: 301488 - DNA, 21 bp, Artificial sequence
  SiRNA target sequence
ttcaacagctaacccaaaccc

SEQ ID NO: 301489 - DNA, 21 bp, Artificial sequence
  SiRNA target sequence
tcaacagctaacccaaaccca

SEQ ID NO: 301490 - DNA, 21 bp, Artificial sequence
  SiRNA target sequence
caacagctaacccaaacccag

SEQ ID NO: 301491 - DNA, 21 bp, Artificial sequence
  SiRNA target sequence
aacagctaacccaaacccaga

SEQ ID NO: 301492 - DNA, 21 bp, Artificial sequence
  SiRNA target sequence
acagctaacccaaacccagaa

SEQ ID NO: 301493 - DNA, 21 bp, Artificial sequence
  SiRNA target sequence
cagctaacccaaacccagaat

SEQ ID NO: 301494 - DNA, 21 bp, Artificial sequence
  SiRNA target sequence
agctaacccaaacccagaatt

SEQ ID NO: 301495 - DNA, 21 bp, Artificial sequence
  SiRNA target sequence
gctaacccaaacccagaattc

SEQ ID NO: 301496 - DNA, 21 bp, Artificial sequence
  SiRNA target sequence
ctaacccaaacccagaattca

SEQ ID NO: 301497 - DNA, 21 bp, Artificial sequence
  SiRNA target sequence
taacccaaacccagaattcat

SEQ ID NO: 301498 - DNA, 21 bp, Artificial sequence
  SiRNA target sequence
aacccaaacccagaattcatg

SEQ ID NO: 301499 - DNA, 21 bp, Artificial sequence
  SiRNA target sequence
acccaaacccagaattcatgg

SEQ ID NO: 301500 - DNA, 21 bp, Artificial sequence
  SiRNA target sequence
cccaaacccagaattcatgga

SEQ ID NO: 301501 - DNA, 21 bp, Artificial sequence
  SiRNA target sequence
ccaaacccagaattcatggaa

SEQ ID NO: 301502 - DNA, 21 bp, Artificial sequence
  SiRNA target sequence
caaacccagaattcatggaat

SEQ ID NO: 301503 - DNA, 21 bp, Artificial sequence
  SiRNA target sequence
aaacccagaattcatggaatt

SEQ ID NO: 301504 - DNA, 21 bp, Artificial sequence
  SiRNA target sequence
aacccagaattcatggaattg

SEQ ID NO: 301505 - DNA, 21 bp, Artificial sequence
  SiRNA target sequence
acccagaattcatggaattga

SEQ ID NO: 301506 - DNA, 21 bp, Artificial sequence
  SiRNA target sequence
cccagaattcatggaattgat

SEQ ID NO: 301507 - DNA, 21 bp, Artificial sequence
  SiRNA target sequence
ccagaattcatggaattgata

SEQ ID NO: 301508 - DNA, 21 bp, Artificial sequence
  SiRNA target sequence
cagaattcatggaattgatac

SEQ ID NO: 301509 - DNA, 21 bp, Artificial sequence
  SiRNA target sequence
agaattcatggaattgatacg

SEQ ID NO: 301510 - DNA, 21 bp, Artificial sequence
  SiRNA target sequence
gaattcatggaattgatacgt

SEQ ID NO: 301511 - DNA, 21 bp, Artificial sequence
  SiRNA target sequence
aattcatggaattgatacgta

SEQ ID NO: 301512 - DNA, 21 bp, Artificial sequence
  SiRNA target sequence
attcatggaattgatacgtac

SEQ ID NO: 301513 - DNA, 21 bp, Artificial sequence
  SiRNA target sequence
ttcatggaattgatacgtact

SEQ ID NO: 301514 - DNA, 21 bp, Artificial sequence
  SiRNA target sequence
tcatggaattgatacgtactg

SEQ ID NO: 301515 - DNA, 21 bp, Artificial sequence
  SiRNA target sequence
catggaattgatacgtactgc

SEQ ID NO: 301516 - DNA, 21 bp, Artificial sequence
  SiRNA target sequence
atggaattgatacgtactgcc

SEQ ID NO: 301517 - DNA, 21 bp, Artificial sequence
  SiRNA target sequence
tggaattgatacgtactgcca

SEQ ID NO: 301518 - DNA, 21 bp, Artificial sequence
  SiRNA target sequence
ggaattgatacgtactgccaa

SEQ ID NO: 301519 - DNA, 21 bp, Artificial sequence
  SiRNA target sequence
gaattgatacgtactgccaat

SEQ ID NO: 301520 - DNA, 21 bp, Artificial sequence
  SiRNA target sequence
aattgatacgtactgccaata

SEQ ID NO: 301521 - DNA, 21 bp, Artificial sequence
  SiRNA target sequence
attgatacgtactgccaatat

SEQ ID NO: 301522 - DNA, 21 bp, Artificial sequence
  SiRNA target sequence
ttgatacgtactgccaatatc

SEQ ID NO: 301523 - DNA, 21 bp, Artificial sequence
  SiRNA target sequence
tgatacgtactgccaatatcg

SEQ ID NO: 301524 - DNA, 21 bp, Artificial sequence
  SiRNA target sequence
gatacgtactgccaatatcgc

SEQ ID NO: 301525 - DNA, 21 bp, Artificial sequence
  SiRNA target sequence
atacgtactgccaatatcgcc

SEQ ID NO: 301526 - DNA, 21 bp, Artificial sequence
  SiRNA target sequence
tacgtactgccaatatcgccc

SEQ ID NO: 301527 - DNA, 21 bp, Artificial sequence
  SiRNA target sequence
acgtactgccaatatcgcccc

SEQ ID NO: 301528 - DNA, 21 bp, Artificial sequence
  SiRNA target sequence
cgtactgccaatatcgccccc

SEQ ID NO: 301529 - DNA, 21 bp, Artificial sequence
  SiRNA target sequence
gtactgccaatatcgccccct

SEQ ID NO: 301530 - DNA, 21 bp, Artificial sequence
  SiRNA target sequence
tactgccaatatcgcccccta

SEQ ID NO: 301531 - DNA, 21 bp, Artificial sequence
  SiRNA target sequence
actgccaatatcgccccctat

SEQ ID NO: 301532 - DNA, 21 bp, Artificial sequence
  SiRNA target sequence
ctgccaatatcgccccctatc

SEQ ID NO: 301533 - DNA, 21 bp, Artificial sequence
  SiRNA target sequence
tgccaatatcgccccctatcc

SEQ ID NO: 301534 - DNA, 21 bp, Artificial sequence
  SiRNA target sequence
gccaatatcgccccctatcct

SEQ ID NO: 301535 - DNA, 21 bp, Artificial sequence
  SiRNA target sequence
ccaatatcgccccctatcctc

SEQ ID NO: 301536 - DNA, 21 bp, Artificial sequence
  SiRNA target sequence
caatatcgccccctatcctct

SEQ ID NO: 301537 - DNA, 21 bp, Artificial sequence
  SiRNA target sequence
aatatcgccccctatcctcta

SEQ ID NO: 301538 - DNA, 21 bp, Artificial sequence
  SiRNA target sequence
atatcgccccctatcctctac

SEQ ID NO: 301539 - DNA, 21 bp, Artificial sequence
  SiRNA target sequence
tatcgccccctatcctctaca

SEQ ID NO: 301540 - DNA, 21 bp, Artificial sequence
  SiRNA target sequence
atcgccccctatcctctacac

SEQ ID NO: 301541 - DNA, 21 bp, Artificial sequence
  SiRNA target sequence
tcgccccctatcctctacaca

SEQ ID NO: 301542 - DNA, 21 bp, Artificial sequence
  SiRNA target sequence
cgccccctatcctctacacat

SEQ ID NO: 301543 - DNA, 21 bp, Artificial sequence
  SiRNA target sequence
gccccctatcctctacacatg

SEQ ID NO: 301544 - DNA, 21 bp, Artificial sequence
  SiRNA target sequence
ccccctatcctctacacatgg

SEQ ID NO: 301545 - DNA, 21 bp, Artificial sequence
  SiRNA target sequence
cccctatcctctacacatggc

SEQ ID NO: 301546 - DNA, 21 bp, Artificial sequence
  SiRNA target sequence
ccctatcctctacacatggcc

SEQ ID NO: 301547 - DNA, 21 bp, Artificial sequence
  SiRNA target sequence
cctatcctctacacatggccc

SEQ ID NO: 301548 - DNA, 21 bp, Artificial sequence
  SiRNA target sequence
ctatcctctacacatggccca

SEQ ID NO: 301549 - DNA, 21 bp, Artificial sequence
  SiRNA target sequence
tatcctctacacatggcccat

SEQ ID NO: 301550 - DNA, 21 bp, Artificial sequence
  SiRNA target sequence
atcctctacacatggcccatt

SEQ ID NO: 301551 - DNA, 21 bp, Artificial sequence
  SiRNA target sequence
tcctctacacatggcccattt

SEQ ID NO: 301552 - DNA, 21 bp, Artificial sequence
  SiRNA target sequence
cctctacacatggcccatttg

SEQ ID NO: 301553 - DNA, 21 bp, Artificial sequence
  SiRNA target sequence
ctctacacatggcccatttgg

SEQ ID NO: 301554 - DNA, 21 bp, Artificial sequence
  SiRNA target sequence
tctacacatggcccatttgga

SEQ ID NO: 301555 - DNA, 21 bp, Artificial sequence
  SiRNA target sequence
ctacacatggcccatttggaa

SEQ ID NO: 301556 - DNA, 21 bp, Artificial sequence
  SiRNA target sequence
tacacatggcccatttggaag

SEQ ID NO: 301557 - DNA, 21 bp, Artificial sequence
  SiRNA target sequence
acacatggcccatttggaaga

SEQ ID NO: 301558 - DNA, 21 bp, Artificial sequence
  SiRNA target sequence
cacatggcccatttggaagat

SEQ ID NO: 301559 - DNA, 21 bp, Artificial sequence
  SiRNA target sequence
acatggcccatttggaagata

SEQ ID NO: 301560 - DNA, 21 bp, Artificial sequence
  SiRNA target sequence
catggcccatttggaagataa

SEQ ID NO: 301561 - DNA, 21 bp, Artificial sequence
  SiRNA target sequence
atggcccatttggaagataag

SEQ ID NO: 301562 - DNA, 21 bp, Artificial sequence
  SiRNA target sequence
tggcccatttggaagataaga

SEQ ID NO: 301563 - DNA, 21 bp, Artificial sequence
  SiRNA target sequence
ggcccatttggaagataagag

SEQ ID NO: 301564 - DNA, 21 bp, Artificial sequence
  SiRNA target sequence
gcccatttggaagataagaga

SEQ ID NO: 301565 - DNA, 21 bp, Artificial sequence
  SiRNA target sequence
cccatttggaagataagagaa

SEQ ID NO: 301566 - DNA, 21 bp, Artificial sequence
  SiRNA target sequence
ccatttggaagataagagaaa

SEQ ID NO: 301567 - DNA, 21 bp, Artificial sequence
  SiRNA target sequence
catttggaagataagagaaag

SEQ ID NO: 301568 - DNA, 21 bp, Artificial sequence
  SiRNA target sequence
atttggaagataagagaaaga

SEQ ID NO: 301569 - DNA, 21 bp, Artificial sequence
  SiRNA target sequence
tttggaagataagagaaagac

SEQ ID NO: 301570 - DNA, 21 bp, Artificial sequence
  SiRNA target sequence
ttggaagataagagaaagacg

SEQ ID NO: 301571 - DNA, 21 bp, Artificial sequence
  SiRNA target sequence
tggaagataagagaaagacga

SEQ ID NO: 301572 - DNA, 21 bp, Artificial sequence
  SiRNA target sequence
ggaagataagagaaagacgaa

SEQ ID NO: 301573 - DNA, 21 bp, Artificial sequence
  SiRNA target sequence
gaagataagagaaagacgaag

SEQ ID NO: 301574 - DNA, 21 bp, Artificial sequence
  SiRNA target sequence
aagataagagaaagacgaagt

SEQ ID NO: 301575 - DNA, 21 bp, Artificial sequence
  SiRNA target sequence
agataagagaaagacgaagtt

SEQ ID NO: 301576 - DNA, 21 bp, Artificial sequence
  SiRNA target sequence
gataagagaaagacgaagttt

SEQ ID NO: 301577 - DNA, 21 bp, Artificial sequence
  SiRNA target sequence
ataagagaaagacgaagttta

SEQ ID NO: 301578 - DNA, 21 bp, Artificial sequence
  SiRNA target sequence
taagagaaagacgaagtttac

SEQ ID NO: 301579 - DNA, 21 bp, Artificial sequence
  SiRNA target sequence
aagagaaagacgaagtttacg

SEQ ID NO: 301580 - DNA, 21 bp, Artificial sequence
  SiRNA target sequence
agagaaagacgaagtttacgt

SEQ ID NO: 301581 - DNA, 21 bp, Artificial sequence
  SiRNA target sequence
gagaaagacgaagtttacgtc

SEQ ID NO: 301582 - DNA, 21 bp, Artificial sequence
  SiRNA target sequence
agaaagacgaagtttacgtcg

SEQ ID NO: 301583 - DNA, 21 bp, Artificial sequence
  SiRNA target sequence
gaaagacgaagtttacgtcga

SEQ ID NO: 301584 - DNA, 21 bp, Artificial sequence
  SiRNA target sequence
aaagacgaagtttacgtcgaa

SEQ ID NO: 301585 - DNA, 21 bp, Artificial sequence
  SiRNA target sequence
aagacgaagtttacgtcgaaa

SEQ ID NO: 301586 - DNA, 21 bp, Artificial sequence
  SiRNA target sequence
agacgaagtttacgtcgaaag

SEQ ID NO: 301587 - DNA, 21 bp, Artificial sequence
  SiRNA target sequence
gacgaagtttacgtcgaaagt

SEQ ID NO: 301588 - DNA, 21 bp, Artificial sequence
  SiRNA target sequence
acgaagtttacgtcgaaagtg

SEQ ID NO: 301589 - DNA, 21 bp, Artificial sequence
  SiRNA target sequence
cgaagtttacgtcgaaagtga

SEQ ID NO: 301590 - DNA, 21 bp, Artificial sequence
  SiRNA target sequence
gaagtttacgtcgaaagtgat

SEQ ID NO: 301591 - DNA, 21 bp, Artificial sequence
  SiRNA target sequence
aagtttacgtcgaaagtgata

SEQ ID NO: 301592 - DNA, 21 bp, Artificial sequence
  SiRNA target sequence
agtttacgtcgaaagtgataa

SEQ ID NO: 301593 - DNA, 21 bp, Artificial sequence
  SiRNA target sequence
gtttacgtcgaaagtgataat

SEQ ID NO: 301594 - DNA, 21 bp, Artificial sequence
  SiRNA target sequence
tttacgtcgaaagtgataatc

SEQ ID NO: 301595 - DNA, 21 bp, Artificial sequence
  SiRNA target sequence
ttacgtcgaaagtgataatca

SEQ ID NO: 301596 - DNA, 21 bp, Artificial sequence
  SiRNA target sequence
tacgtcgaaagtgataatcat

SEQ ID NO: 301597 - DNA, 21 bp, Artificial sequence
  SiRNA target sequence
acgtcgaaagtgataatcatg

SEQ ID NO: 301598 - DNA, 21 bp, Artificial sequence
  SiRNA target sequence
cgtcgaaagtgataatcatga

SEQ ID NO: 301599 - DNA, 21 bp, Artificial sequence
  SiRNA target sequence
gtcgaaagtgataatcatgac

SEQ ID NO: 301600 - DNA, 21 bp, Artificial sequence
  SiRNA target sequence
tcgaaagtgataatcatgaca

SEQ ID NO: 301601 - DNA, 21 bp, Artificial sequence
  SiRNA target sequence
cgaaagtgataatcatgacat

SEQ ID NO: 301602 - DNA, 21 bp, Artificial sequence
  SiRNA target sequence
gaaagtgataatcatgacatc

SEQ ID NO: 301603 - DNA, 21 bp, Artificial sequence
  SiRNA target sequence
aaagtgataatcatgacatcc

SEQ ID NO: 301604 - DNA, 21 bp, Artificial sequence
  SiRNA target sequence
aagtgataatcatgacatcca

SEQ ID NO: 301605 - DNA, 21 bp, Artificial sequence
  SiRNA target sequence
agtgataatcatgacatccaa

SEQ ID NO: 301606 - DNA, 21 bp, Artificial sequence
  SiRNA target sequence
gtgataatcatgacatccaat

SEQ ID NO: 301607 - DNA, 21 bp, Artificial sequence
  SiRNA target sequence
tgataatcatgacatccaatg

SEQ ID NO: 301608 - DNA, 21 bp, Artificial sequence
  SiRNA target sequence
gataatcatgacatccaatgt

SEQ ID NO: 301609 - DNA, 21 bp, Artificial sequence
  SiRNA target sequence
ataatcatgacatccaatgtt

SEQ ID NO: 301610 - DNA, 21 bp, Artificial sequence
  SiRNA target sequence
taatcatgacatccaatgttt

SEQ ID NO: 301611 - DNA, 21 bp, Artificial sequence
  SiRNA target sequence
aatcatgacatccaatgtttt

SEQ ID NO: 301612 - DNA, 21 bp, Artificial sequence
  SiRNA target sequence
atcatgacatccaatgttttt

SEQ ID NO: 301613 - DNA, 21 bp, Artificial sequence
  SiRNA target sequence
tcatgacatccaatgtttttg

SEQ ID NO: 301614 - DNA, 21 bp, Artificial sequence
  SiRNA target sequence
catgacatccaatgtttttga

SEQ ID NO: 301615 - DNA, 21 bp, Artificial sequence
  SiRNA target sequence
atgacatccaatgtttttgaa

SEQ ID NO: 301616 - DNA, 21 bp, Artificial sequence
  SiRNA target sequence
tgacatccaatgtttttgaac

SEQ ID NO: 301617 - DNA, 21 bp, Artificial sequence
  SiRNA target sequence
gacatccaatgtttttgaaca

SEQ ID NO: 301618 - DNA, 21 bp, Artificial sequence
  SiRNA target sequence
acatccaatgtttttgaacaa

SEQ ID NO: 301619 - DNA, 21 bp, Artificial sequence
  SiRNA target sequence
catccaatgtttttgaacaat

SEQ ID NO: 301620 - DNA, 21 bp, Artificial sequence
  SiRNA target sequence
atccaatgtttttgaacaatc

SEQ ID NO: 301621 - DNA, 21 bp, Artificial sequence
  SiRNA target sequence
tccaatgtttttgaacaatct

SEQ ID NO: 301622 - DNA, 21 bp, Artificial sequence
  SiRNA target sequence
ccaatgtttttgaacaatctg

SEQ ID NO: 301623 - DNA, 21 bp, Artificial sequence
  SiRNA target sequence
caatgtttttgaacaatctgt

SEQ ID NO: 301624 - DNA, 21 bp, Artificial sequence
  SiRNA target sequence
aatgtttttgaacaatctgta

SEQ ID NO: 301625 - DNA, 21 bp, Artificial sequence
  SiRNA target sequence
atgtttttgaacaatctgtaa

SEQ ID NO: 301626 - DNA, 21 bp, Artificial sequence
  SiRNA target sequence
tgtttttgaacaatctgtaaa

SEQ ID NO: 301627 - DNA, 21 bp, Artificial sequence
  SiRNA target sequence
gtttttgaacaatctgtaaat

SEQ ID NO: 301628 - DNA, 21 bp, Artificial sequence
  SiRNA target sequence
tttttgaacaatctgtaaatt

SEQ ID NO: 301629 - DNA, 21 bp, Artificial sequence
  SiRNA target sequence
ttttgaacaatctgtaaattc

SEQ ID NO: 301630 - DNA, 21 bp, Artificial sequence
  SiRNA target sequence
tttgaacaatctgtaaattcg

SEQ ID NO: 301631 - DNA, 21 bp, Artificial sequence
  SiRNA target sequence
ttgaacaatctgtaaattcgc

SEQ ID NO: 301632 - DNA, 21 bp, Artificial sequence
  SiRNA target sequence
tgaacaatctgtaaattcgct

SEQ ID NO: 301633 - DNA, 21 bp, Artificial sequence
  SiRNA target sequence
gaacaatctgtaaattcgctt

SEQ ID NO: 301634 - DNA, 21 bp, Artificial sequence
  SiRNA target sequence
aacaatctgtaaattcgctta

SEQ ID NO: 301635 - DNA, 21 bp, Artificial sequence
  SiRNA target sequence
acaatctgtaaattcgcttac

SEQ ID NO: 301636 - DNA, 21 bp, Artificial sequence
  SiRNA target sequence
caatctgtaaattcgcttact

SEQ ID NO: 301637 - DNA, 21 bp, Artificial sequence
  SiRNA target sequence
aatctgtaaattcgcttactt

SEQ ID NO: 301638 - DNA, 21 bp, Artificial sequence
  SiRNA target sequence
atctgtaaattcgcttacttt

SEQ ID NO: 301639 - DNA, 21 bp, Artificial sequence
  SiRNA target sequence
tctgtaaattcgcttactttt

SEQ ID NO: 301640 - DNA, 21 bp, Artificial sequence
  SiRNA target sequence
ctgtaaattcgcttacttttc

SEQ ID NO: 301641 - DNA, 21 bp, Artificial sequence
  SiRNA target sequence
tgtaaattcgcttacttttcc

SEQ ID NO: 301642 - DNA, 21 bp, Artificial sequence
  SiRNA target sequence
gtaaattcgcttacttttcct

SEQ ID NO: 301643 - DNA, 21 bp, Artificial sequence
  SiRNA target sequence
taaattcgcttacttttcctg

SEQ ID NO: 301644 - DNA, 21 bp, Artificial sequence
  SiRNA target sequence
aaattcgcttacttttcctga

SEQ ID NO: 301645 - DNA, 21 bp, Artificial sequence
  SiRNA target sequence
aattcgcttacttttcctgat

SEQ ID NO: 301646 - DNA, 21 bp, Artificial sequence
  SiRNA target sequence
attcgcttacttttcctgatg

SEQ ID NO: 301647 - DNA, 21 bp, Artificial sequence
  SiRNA target sequence
ttcgcttacttttcctgatgc

SEQ ID NO: 301648 - DNA, 21 bp, Artificial sequence
  SiRNA target sequence
tcgcttacttttcctgatgct

SEQ ID NO: 301649 - DNA, 21 bp, Artificial sequence
  SiRNA target sequence
cgcttacttttcctgatgctt

SEQ ID NO: 301650 - DNA, 21 bp, Artificial sequence
  SiRNA target sequence
gcttacttttcctgatgcttt

SEQ ID NO: 301651 - DNA, 21 bp, Artificial sequence
  SiRNA target sequence
cttacttttcctgatgctttc

SEQ ID NO: 301652 - DNA, 21 bp, Artificial sequence
  SiRNA target sequence
ttacttttcctgatgctttca

SEQ ID NO: 301653 - DNA, 21 bp, Artificial sequence
  SiRNA target sequence
tacttttcctgatgctttcag

SEQ ID NO: 301654 - DNA, 21 bp, Artificial sequence
  SiRNA target sequence
acttttcctgatgctttcaga

SEQ ID NO: 301655 - DNA, 21 bp, Artificial sequence
  SiRNA target sequence
cttttcctgatgctttcagac

SEQ ID NO: 301656 - DNA, 21 bp, Artificial sequence
  SiRNA target sequence
ttttcctgatgctttcagacg

SEQ ID NO: 301657 - DNA, 21 bp, Artificial sequence
  SiRNA target sequence
tttcctgatgctttcagacgc

SEQ ID NO: 301658 - DNA, 21 bp, Artificial sequence
  SiRNA target sequence
ttcctgatgctttcagacgca

SEQ ID NO: 301659 - DNA, 21 bp, Artificial sequence
  SiRNA target sequence
tcctgatgctttcagacgcag

SEQ ID NO: 301660 - DNA, 21 bp, Artificial sequence
  SiRNA target sequence
cctgatgctttcagacgcaga

SEQ ID NO: 301661 - DNA, 21 bp, Artificial sequence
  SiRNA target sequence
ctgatgctttcagacgcagag

SEQ ID NO: 301662 - DNA, 21 bp, Artificial sequence
  SiRNA target sequence
tgatgctttcagacgcagagt

SEQ ID NO: 301663 - DNA, 21 bp, Artificial sequence
  SiRNA target sequence
gatgctttcagacgcagagta

SEQ ID NO: 301664 - DNA, 21 bp, Artificial sequence
  SiRNA target sequence
atgctttcagacgcagagtag

SEQ ID NO: 301665 - DNA, 21 bp, Artificial sequence
  SiRNA target sequence
tgctttcagacgcagagtaga

SEQ ID NO: 301666 - DNA, 21 bp, Artificial sequence
  SiRNA target sequence
gctttcagacgcagagtagat

SEQ ID NO: 301667 - DNA, 21 bp, Artificial sequence
  SiRNA target sequence
ctttcagacgcagagtagatc

SEQ ID NO: 301668 - DNA, 21 bp, Artificial sequence
  SiRNA target sequence
tttcagacgcagagtagatct

SEQ ID NO: 301669 - DNA, 21 bp, Artificial sequence
  SiRNA target sequence
ttcagacgcagagtagatctg

SEQ ID NO: 301670 - DNA, 21 bp, Artificial sequence
  SiRNA target sequence
tcagacgcagagtagatctgt

SEQ ID NO: 301671 - DNA, 21 bp, Artificial sequence
  SiRNA target sequence
cagacgcagagtagatctgtg

SEQ ID NO: 301672 - DNA, 21 bp, Artificial sequence
  SiRNA target sequence
agacgcagagtagatctgtgt

SEQ ID NO: 301673 - DNA, 21 bp, Artificial sequence
  SiRNA target sequence
gacgcagagtagatctgtgtg

SEQ ID NO: 301674 - DNA, 21 bp, Artificial sequence
  SiRNA target sequence
acgcagagtagatctgtgtgc

SEQ ID NO: 301675 - DNA, 21 bp, Artificial sequence
  SiRNA target sequence
cgcagagtagatctgtgtgct

SEQ ID NO: 301676 - DNA, 21 bp, Artificial sequence
  SiRNA target sequence
gcagagtagatctgtgtgctg

SEQ ID NO: 301677 - DNA, 21 bp, Artificial sequence
  SiRNA target sequence
cagagtagatctgtgtgctga

SEQ ID NO: 301678 - DNA, 21 bp, Artificial sequence
  SiRNA target sequence
agagtagatctgtgtgctgaa

SEQ ID NO: 301679 - DNA, 21 bp, Artificial sequence
  SiRNA target sequence
gagtagatctgtgtgctgaag

SEQ ID NO: 301680 - DNA, 21 bp, Artificial sequence
  SiRNA target sequence
agtagatctgtgtgctgaagt

SEQ ID NO: 301681 - DNA, 21 bp, Artificial sequence
  SiRNA target sequence
gtagatctgtgtgctgaagtg

SEQ ID NO: 301682 - DNA, 21 bp, Artificial sequence
  SiRNA target sequence
tagatctgtgtgctgaagtgc

SEQ ID NO: 301683 - DNA, 21 bp, Artificial sequence
  SiRNA target sequence
agatctgtgtgctgaagtgcg

SEQ ID NO: 301684 - DNA, 21 bp, Artificial sequence
  SiRNA target sequence
gatctgtgtgctgaagtgcgc

SEQ ID NO: 301685 - DNA, 21 bp, Artificial sequence
  SiRNA target sequence
atctgtgtgctgaagtgcgca

SEQ ID NO: 301686 - DNA, 21 bp, Artificial sequence
  SiRNA target sequence
tctgtgtgctgaagtgcgcaa

SEQ ID NO: 301687 - DNA, 21 bp, Artificial sequence
  SiRNA target sequence
ctgtgtgctgaagtgcgcaat

SEQ ID NO: 301688 - DNA, 21 bp, Artificial sequence
  SiRNA target sequence
tgtgtgctgaagtgcgcaata

SEQ ID NO: 301689 - DNA, 21 bp, Artificial sequence
  SiRNA target sequence
gtgtgctgaagtgcgcaataa

SEQ ID NO: 301690 - DNA, 21 bp, Artificial sequence
  SiRNA target sequence
tgtgctgaagtgcgcaataag

SEQ ID NO: 301691 - DNA, 21 bp, Artificial sequence
  SiRNA target sequence
gtgctgaagtgcgcaataagg

SEQ ID NO: 301692 - DNA, 21 bp, Artificial sequence
  SiRNA target sequence
tgctgaagtgcgcaataagga

SEQ ID NO: 301693 - DNA, 21 bp, Artificial sequence
  SiRNA target sequence
gctgaagtgcgcaataaggaa

SEQ ID NO: 301694 - DNA, 21 bp, Artificial sequence
  SiRNA target sequence
ctgaagtgcgcaataaggaag

SEQ ID NO: 301695 - DNA, 21 bp, Artificial sequence
  SiRNA target sequence
tgaagtgcgcaataaggaaga

SEQ ID NO: 301696 - DNA, 21 bp, Artificial sequence
  SiRNA target sequence
gaagtgcgcaataaggaagaa

SEQ ID NO: 301697 - DNA, 21 bp, Artificial sequence
  SiRNA target sequence
aagtgcgcaataaggaagaat

SEQ ID NO: 301698 - DNA, 21 bp, Artificial sequence
  SiRNA target sequence
agtgcgcaataaggaagaata

SEQ ID NO: 301699 - DNA, 21 bp, Artificial sequence
  SiRNA target sequence
gtgcgcaataaggaagaatat

SEQ ID NO: 301700 - DNA, 21 bp, Artificial sequence
  SiRNA target sequence
tgcgcaataaggaagaatata

SEQ ID NO: 301701 - DNA, 21 bp, Artificial sequence
  SiRNA target sequence
gcgcaataaggaagaatatac

SEQ ID NO: 301702 - DNA, 21 bp, Artificial sequence
  SiRNA target sequence
cgcaataaggaagaatatacg

SEQ ID NO: 301703 - DNA, 21 bp, Artificial sequence
  SiRNA target sequence
gcaataaggaagaatatacga

SEQ ID NO: 301704 - DNA, 21 bp, Artificial sequence
  SiRNA target sequence
caataaggaagaatatacgaa

SEQ ID NO: 301705 - DNA, 21 bp, Artificial sequence
  SiRNA target sequence
aataaggaagaatatacgaag

SEQ ID NO: 301706 - DNA, 21 bp, Artificial sequence
  SiRNA target sequence
ataaggaagaatatacgaagg

SEQ ID NO: 301707 - DNA, 21 bp, Artificial sequence
  SiRNA target sequence
taaggaagaatatacgaagga

SEQ ID NO: 301708 - DNA, 21 bp, Artificial sequence
  SiRNA target sequence
aaggaagaatatacgaaggaa

SEQ ID NO: 301709 - DNA, 21 bp, Artificial sequence
  SiRNA target sequence
aggaagaatatacgaaggaag

SEQ ID NO: 301710 - DNA, 21 bp, Artificial sequence
  SiRNA target sequence
ggaagaatatacgaaggaagg

SEQ ID NO: 301711 - DNA, 21 bp, Artificial sequence
  SiRNA target sequence
gaagaatatacgaaggaaggt

SEQ ID NO: 301712 - DNA, 21 bp, Artificial sequence
  SiRNA target sequence
aagaatatacgaaggaaggtt

SEQ ID NO: 301713 - DNA, 21 bp, Artificial sequence
  SiRNA target sequence
agaatatacgaaggaaggtta

SEQ ID NO: 301714 - DNA, 21 bp, Artificial sequence
  SiRNA target sequence
gaatatacgaaggaaggttat

SEQ ID NO: 301715 - DNA, 21 bp, Artificial sequence
  SiRNA target sequence
aatatacgaaggaaggttatt

SEQ ID NO: 301716 - DNA, 21 bp, Artificial sequence
  SiRNA target sequence
atatacgaaggaaggttattc

SEQ ID NO: 301717 - DNA, 21 bp, Artificial sequence
  SiRNA target sequence
tatacgaaggaaggttattct

SEQ ID NO: 301718 - DNA, 21 bp, Artificial sequence
  SiRNA target sequence
atacgaaggaaggttattcta

SEQ ID NO: 301719 - DNA, 21 bp, Artificial sequence
  SiRNA target sequence
tacgaaggaaggttattctaa

SEQ ID NO: 301720 - DNA, 21 bp, Artificial sequence
  SiRNA target sequence
acgaaggaaggttattctaag

SEQ ID NO: 301721 - DNA, 21 bp, Artificial sequence
  SiRNA target sequence
cgaaggaaggttattctaagc

SEQ ID NO: 301722 - DNA, 21 bp, Artificial sequence
  SiRNA target sequence
gaaggaaggttattctaagca

SEQ ID NO: 301723 - DNA, 21 bp, Artificial sequence
  SiRNA target sequence
aaggaaggttattctaagcag

SEQ ID NO: 301724 - DNA, 21 bp, Artificial sequence
  SiRNA target sequence
aggaaggttattctaagcaga

SEQ ID NO: 301725 - DNA, 21 bp, Artificial sequence
  SiRNA target sequence
ggaaggttattctaagcagaa

SEQ ID NO: 301726 - DNA, 21 bp, Artificial sequence
  SiRNA target sequence
gaaggttattctaagcagaag

SEQ ID NO: 301727 - DNA, 21 bp, Artificial sequence
  SiRNA target sequence
aaggttattctaagcagaagg

SEQ ID NO: 301728 - DNA, 21 bp, Artificial sequence
  SiRNA target sequence
aggttattctaagcagaaggg

SEQ ID NO: 301729 - DNA, 21 bp, Artificial sequence
  SiRNA target sequence
ggttattctaagcagaaggga

SEQ ID NO: 301730 - DNA, 21 bp, Artificial sequence
  SiRNA target sequence
gttattctaagcagaagggat

SEQ ID NO: 301731 - DNA, 21 bp, Artificial sequence
  SiRNA target sequence
ttattctaagcagaagggatg

SEQ ID NO: 301732 - DNA, 21 bp, Artificial sequence
  SiRNA target sequence
tattctaagcagaagggatgc

SEQ ID NO: 301733 - DNA, 21 bp, Artificial sequence
  SiRNA target sequence
attctaagcagaagggatgca

SEQ ID NO: 301734 - DNA, 21 bp, Artificial sequence
  SiRNA target sequence
ttctaagcagaagggatgcat

SEQ ID NO: 301735 - DNA, 21 bp, Artificial sequence
  SiRNA target sequence
tctaagcagaagggatgcatg

SEQ ID NO: 301736 - DNA, 21 bp, Artificial sequence
  SiRNA target sequence
ctaagcagaagggatgcatgg

SEQ ID NO: 301737 - DNA, 21 bp, Artificial sequence
  SiRNA target sequence
taagcagaagggatgcatggt

SEQ ID NO: 301738 - DNA, 21 bp, Artificial sequence
  SiRNA target sequence
aagcagaagggatgcatggtt

SEQ ID NO: 301739 - DNA, 21 bp, Artificial sequence
  SiRNA target sequence
agcagaagggatgcatggtta

SEQ ID NO: 301740 - DNA, 21 bp, Artificial sequence
  SiRNA target sequence
gcagaagggatgcatggttaa

SEQ ID NO: 301741 - DNA, 21 bp, Artificial sequence
  SiRNA target sequence
cagaagggatgcatggttaag

SEQ ID NO: 301742 - DNA, 21 bp, Artificial sequence
  SiRNA target sequence
agaagggatgcatggttaagc

SEQ ID NO: 301743 - DNA, 21 bp, Artificial sequence
  SiRNA target sequence
gaagggatgcatggttaagcg

SEQ ID NO: 301744 - DNA, 21 bp, Artificial sequence
  SiRNA target sequence
aagggatgcatggttaagcga

SEQ ID NO: 301745 - DNA, 21 bp, Artificial sequence
  SiRNA target sequence
agggatgcatggttaagcgat

SEQ ID NO: 301746 - DNA, 21 bp, Artificial sequence
  SiRNA target sequence
gggatgcatggttaagcgatt

SEQ ID NO: 301747 - DNA, 21 bp, Artificial sequence
  SiRNA target sequence
ggatgcatggttaagcgatta

SEQ ID NO: 301748 - DNA, 21 bp, Artificial sequence
  SiRNA target sequence
gatgcatggttaagcgattag

SEQ ID NO: 301749 - DNA, 21 bp, Artificial sequence
  SiRNA target sequence
atgcatggttaagcgattaga

SEQ ID NO: 301750 - DNA, 21 bp, Artificial sequence
  SiRNA target sequence
tgcatggttaagcgattagat

SEQ ID NO: 301751 - DNA, 21 bp, Artificial sequence
  SiRNA target sequence
gcatggttaagcgattagatc

SEQ ID NO: 301752 - DNA, 21 bp, Artificial sequence
  SiRNA target sequence
catggttaagcgattagatcg

SEQ ID NO: 301753 - DNA, 21 bp, Artificial sequence
  SiRNA target sequence
atggttaagcgattagatcgt

SEQ ID NO: 301754 - DNA, 21 bp, Artificial sequence
  SiRNA target sequence
tggttaagcgattagatcgtg

SEQ ID NO: 301755 - DNA, 21 bp, Artificial sequence
  SiRNA target sequence
ggttaagcgattagatcgtga

SEQ ID NO: 301756 - DNA, 21 bp, Artificial sequence
  SiRNA target sequence
gttaagcgattagatcgtgaa

SEQ ID NO: 301757 - DNA, 21 bp, Artificial sequence
  SiRNA target sequence
ttaagcgattagatcgtgaaa

SEQ ID NO: 301758 - DNA, 21 bp, Artificial sequence
  SiRNA target sequence
taagcgattagatcgtgaaaa

SEQ ID NO: 301759 - DNA, 21 bp, Artificial sequence
  SiRNA target sequence
aagcgattagatcgtgaaaag

SEQ ID NO: 301760 - DNA, 21 bp, Artificial sequence
  SiRNA target sequence
agcgattagatcgtgaaaagg

SEQ ID NO: 301761 - DNA, 21 bp, Artificial sequence
  SiRNA target sequence
gcgattagatcgtgaaaaggt

SEQ ID NO: 301762 - DNA, 21 bp, Artificial sequence
  SiRNA target sequence
cgattagatcgtgaaaaggtg

SEQ ID NO: 301763 - DNA, 21 bp, Artificial sequence
  SiRNA target sequence
gattagatcgtgaaaaggtgc

SEQ ID NO: 301764 - DNA, 21 bp, Artificial sequence
  SiRNA target sequence
attagatcgtgaaaaggtgca

SEQ ID NO: 301765 - DNA, 21 bp, Artificial sequence
  SiRNA target sequence
ttagatcgtgaaaaggtgcag

SEQ ID NO: 301766 - DNA, 21 bp, Artificial sequence
  SiRNA target sequence
tagatcgtgaaaaggtgcaga

SEQ ID NO: 301767 - DNA, 21 bp, Artificial sequence
  SiRNA target sequence
agatcgtgaaaaggtgcagaa

SEQ ID NO: 301768 - DNA, 21 bp, Artificial sequence
  SiRNA target sequence
gatcgtgaaaaggtgcagaag

SEQ ID NO: 301769 - DNA, 21 bp, Artificial sequence
  SiRNA target sequence
atcgtgaaaaggtgcagaagt

SEQ ID NO: 301770 - DNA, 21 bp, Artificial sequence
  SiRNA target sequence
tcgtgaaaaggtgcagaagtt

SEQ ID NO: 301771 - DNA, 21 bp, Artificial sequence
  SiRNA target sequence
cgtgaaaaggtgcagaagttg

SEQ ID NO: 301772 - DNA, 21 bp, Artificial sequence
  SiRNA target sequence
gtgaaaaggtgcagaagttga

SEQ ID NO: 301773 - DNA, 21 bp, Artificial sequence
  SiRNA target sequence
tgaaaaggtgcagaagttgac

SEQ ID NO: 301774 - DNA, 21 bp, Artificial sequence
  SiRNA target sequence
gaaaaggtgcagaagttgaca

SEQ ID NO: 301775 - DNA, 21 bp, Artificial sequence
  SiRNA target sequence
aaaaggtgcagaagttgacag

SEQ ID NO: 301776 - DNA, 21 bp, Artificial sequence
  SiRNA target sequence
aaaggtgcagaagttgacagg

SEQ ID NO: 301777 - DNA, 21 bp, Artificial sequence
  SiRNA target sequence
aaggtgcagaagttgacagga

SEQ ID NO: 301778 - DNA, 21 bp, Artificial sequence
  SiRNA target sequence
aggtgcagaagttgacaggag

SEQ ID NO: 301779 - DNA, 21 bp, Artificial sequence
  SiRNA target sequence
ggtgcagaagttgacaggaga

SEQ ID NO: 301780 - DNA, 21 bp, Artificial sequence
  SiRNA target sequence
gtgcagaagttgacaggagat

SEQ ID NO: 301781 - DNA, 21 bp, Artificial sequence
  SiRNA target sequence
tgcagaagttgacaggagata

SEQ ID NO: 301782 - DNA, 21 bp, Artificial sequence
  SiRNA target sequence
gcagaagttgacaggagatat

SEQ ID NO: 301783 - DNA, 21 bp, Artificial sequence
  SiRNA target sequence
cagaagttgacaggagatatt

SEQ ID NO: 301784 - DNA, 21 bp, Artificial sequence
  SiRNA target sequence
agaagttgacaggagatattc

SEQ ID NO: 301785 - DNA, 21 bp, Artificial sequence
  SiRNA target sequence
gaagttgacaggagatattca

SEQ ID NO: 301786 - DNA, 21 bp, Artificial sequence
  SiRNA target sequence
aagttgacaggagatattcac

SEQ ID NO: 301787 - DNA, 21 bp, Artificial sequence
  SiRNA target sequence
agttgacaggagatattcact

SEQ ID NO: 301788 - DNA, 21 bp, Artificial sequence
  SiRNA target sequence
gttgacaggagatattcactc

SEQ ID NO: 301789 - DNA, 21 bp, Artificial sequence
  SiRNA target sequence
ttgacaggagatattcactca

SEQ ID NO: 301790 - DNA, 21 bp, Artificial sequence
  SiRNA target sequence
tgacaggagatattcactcaa

SEQ ID NO: 301791 - DNA, 21 bp, Artificial sequence
  SiRNA target sequence
gacaggagatattcactcaac

SEQ ID NO: 301792 - DNA, 21 bp, Artificial sequence
  SiRNA target sequence
acaggagatattcactcaacg

SEQ ID NO: 301793 - DNA, 21 bp, Artificial sequence
  SiRNA target sequence
caggagatattcactcaacga

SEQ ID NO: 301794 - DNA, 21 bp, Artificial sequence
  SiRNA target sequence
aggagatattcactcaacgaa

SEQ ID NO: 301795 - DNA, 21 bp, Artificial sequence
  SiRNA target sequence
ggagatattcactcaacgaaa

SEQ ID NO: 301796 - DNA, 21 bp, Artificial sequence
  SiRNA target sequence
gagatattcactcaacgaaac

SEQ ID NO: 301797 - DNA, 21 bp, Artificial sequence
  SiRNA target sequence
agatattcactcaacgaaacc

SEQ ID NO: 301798 - DNA, 21 bp, Artificial sequence
  SiRNA target sequence
gatattcactcaacgaaacca

SEQ ID NO: 301799 - DNA, 21 bp, Artificial sequence
  SiRNA target sequence
atattcactcaacgaaaccat

SEQ ID NO: 301800 - DNA, 21 bp, Artificial sequence
  SiRNA target sequence
tattcactcaacgaaaccata

SEQ ID NO: 301801 - DNA, 21 bp, Artificial sequence
  SiRNA target sequence
attcactcaacgaaaccatat

SEQ ID NO: 301802 - DNA, 21 bp, Artificial sequence
  SiRNA target sequence
ttcactcaacgaaaccatatt

SEQ ID NO: 301803 - DNA, 21 bp, Artificial sequence
  SiRNA target sequence
tcactcaacgaaaccatattt

SEQ ID NO: 301804 - DNA, 21 bp, Artificial sequence
  SiRNA target sequence
cactcaacgaaaccatatttg

SEQ ID NO: 301805 - DNA, 21 bp, Artificial sequence
  SiRNA target sequence
actcaacgaaaccatatttgg

SEQ ID NO: 301806 - DNA, 21 bp, Artificial sequence
  SiRNA target sequence
ctcaacgaaaccatatttggt

SEQ ID NO: 301807 - DNA, 21 bp, Artificial sequence
  SiRNA target sequence
tcaacgaaaccatatttggtt

SEQ ID NO: 301808 - DNA, 21 bp, Artificial sequence
  SiRNA target sequence
caacgaaaccatatttggttg

SEQ ID NO: 301809 - DNA, 21 bp, Artificial sequence
  SiRNA target sequence
aacgaaaccatatttggttga

SEQ ID NO: 301810 - DNA, 21 bp, Artificial sequence
  SiRNA target sequence
acgaaaccatatttggttgac

SEQ ID NO: 301811 - DNA, 21 bp, Artificial sequence
  SiRNA target sequence
cgaaaccatatttggttgact

SEQ ID NO: 301812 - DNA, 21 bp, Artificial sequence
  SiRNA target sequence
gaaaccatatttggttgactt

SEQ ID NO: 301813 - DNA, 21 bp, Artificial sequence
  SiRNA target sequence
aaaccatatttggttgactta

SEQ ID NO: 301814 - DNA, 21 bp, Artificial sequence
  SiRNA target sequence
aaccatatttggttgacttag

SEQ ID NO: 301815 - DNA, 21 bp, Artificial sequence
  SiRNA target sequence
accatatttggttgacttagt

SEQ ID NO: 301816 - DNA, 21 bp, Artificial sequence
  SiRNA target sequence
ccatatttggttgacttagtg

SEQ ID NO: 301817 - DNA, 21 bp, Artificial sequence
  SiRNA target sequence
catatttggttgacttagtga

SEQ ID NO: 301818 - DNA, 21 bp, Artificial sequence
  SiRNA target sequence
atatttggttgacttagtgaa

SEQ ID NO: 301819 - DNA, 21 bp, Artificial sequence
  SiRNA target sequence
tatttggttgacttagtgaat

SEQ ID NO: 301820 - DNA, 21 bp, Artificial sequence
  SiRNA target sequence
atttggttgacttagtgaatg

SEQ ID NO: 301821 - DNA, 21 bp, Artificial sequence
  SiRNA target sequence
tttggttgacttagtgaatgc

SEQ ID NO: 301822 - DNA, 21 bp, Artificial sequence
  SiRNA target sequence
ttggttgacttagtgaatgca

SEQ ID NO: 301823 - DNA, 21 bp, Artificial sequence
  SiRNA target sequence
tggttgacttagtgaatgcag

SEQ ID NO: 301824 - DNA, 21 bp, Artificial sequence
  SiRNA target sequence
ggttgacttagtgaatgcaga

SEQ ID NO: 301825 - DNA, 21 bp, Artificial sequence
  SiRNA target sequence
gttgacttagtgaatgcagag

SEQ ID NO: 301826 - DNA, 21 bp, Artificial sequence
  SiRNA target sequence
ttgacttagtgaatgcagaga

SEQ ID NO: 301827 - DNA, 21 bp, Artificial sequence
  SiRNA target sequence
tgacttagtgaatgcagagac

SEQ ID NO: 301828 - DNA, 21 bp, Artificial sequence
  SiRNA target sequence
gacttagtgaatgcagagacc

SEQ ID NO: 301829 - DNA, 21 bp, Artificial sequence
  SiRNA target sequence
acttagtgaatgcagagaccg

SEQ ID NO: 301830 - DNA, 21 bp, Artificial sequence
  SiRNA target sequence
cttagtgaatgcagagaccgg

SEQ ID NO: 301831 - DNA, 21 bp, Artificial sequence
  SiRNA target sequence
ttagtgaatgcagagaccgga

SEQ ID NO: 301832 - DNA, 21 bp, Artificial sequence
  SiRNA target sequence
tagtgaatgcagagaccggag

SEQ ID NO: 301833 - DNA, 21 bp, Artificial sequence
  SiRNA target sequence
agtgaatgcagagaccggaga

SEQ ID NO: 301834 - DNA, 21 bp, Artificial sequence
  SiRNA target sequence
gtgaatgcagagaccggagaa

SEQ ID NO: 301835 - DNA, 21 bp, Artificial sequence
  SiRNA target sequence
tgaatgcagagaccggagaaa

SEQ ID NO: 301836 - DNA, 21 bp, Artificial sequence
  SiRNA target sequence
gaatgcagagaccggagaaaa

SEQ ID NO: 301837 - DNA, 21 bp, Artificial sequence
  SiRNA target sequence
aatgcagagaccggagaaaaa

SEQ ID NO: 301838 - DNA, 21 bp, Artificial sequence
  SiRNA target sequence
atgcagagaccggagaaaaat

SEQ ID NO: 301839 - DNA, 21 bp, Artificial sequence
  SiRNA target sequence
tgcagagaccggagaaaaata

SEQ ID NO: 301840 - DNA, 21 bp, Artificial sequence
  SiRNA target sequence
gcagagaccggagaaaaatat

SEQ ID NO: 301841 - DNA, 21 bp, Artificial sequence
  SiRNA target sequence
cagagaccggagaaaaatata

SEQ ID NO: 301842 - DNA, 21 bp, Artificial sequence
  SiRNA target sequence
agagaccggagaaaaatataa

SEQ ID NO: 301843 - DNA, 21 bp, Artificial sequence
  SiRNA target sequence
gagaccggagaaaaatataag

SEQ ID NO: 301844 - DNA, 21 bp, Artificial sequence
  SiRNA target sequence
agaccggagaaaaatataaga

SEQ ID NO: 301845 - DNA, 21 bp, Artificial sequence
  SiRNA target sequence
gaccggagaaaaatataagac

SEQ ID NO: 301846 - DNA, 21 bp, Artificial sequence
  SiRNA target sequence
accggagaaaaatataagact

SEQ ID NO: 301847 - DNA, 21 bp, Artificial sequence
  SiRNA target sequence
ccggagaaaaatataagactg

SEQ ID NO: 301848 - DNA, 21 bp, Artificial sequence
  SiRNA target sequence
cggagaaaaatataagactga

SEQ ID NO: 301849 - DNA, 21 bp, Artificial sequence
  SiRNA target sequence
ggagaaaaatataagactgac

SEQ ID NO: 301850 - DNA, 21 bp, Artificial sequence
  SiRNA target sequence
gagaaaaatataagactgaca

SEQ ID NO: 301851 - DNA, 21 bp, Artificial sequence
  SiRNA target sequence
agaaaaatataagactgacat

SEQ ID NO: 301852 - DNA, 21 bp, Artificial sequence
  SiRNA target sequence
gaaaaatataagactgacatt

SEQ ID NO: 301853 - DNA, 21 bp, Artificial sequence
  SiRNA target sequence
aaaaatataagactgacattg

SEQ ID NO: 301854 - DNA, 21 bp, Artificial sequence
  SiRNA target sequence
aaaatataagactgacattga

SEQ ID NO: 301855 - DNA, 21 bp, Artificial sequence
  SiRNA target sequence
aaatataagactgacattgaa

SEQ ID NO: 301856 - DNA, 21 bp, Artificial sequence
  SiRNA target sequence
aatataagactgacattgaat

SEQ ID NO: 301857 - DNA, 21 bp, Artificial sequence
  SiRNA target sequence
atataagactgacattgaata

SEQ ID NO: 301858 - DNA, 21 bp, Artificial sequence
  SiRNA target sequence
tataagactgacattgaatat

SEQ ID NO: 301859 - DNA, 21 bp, Artificial sequence
  SiRNA target sequence
ataagactgacattgaatatg

SEQ ID NO: 301860 - DNA, 21 bp, Artificial sequence
  SiRNA target sequence
taagactgacattgaatatga

SEQ ID NO: 301861 - DNA, 21 bp, Artificial sequence
  SiRNA target sequence
aagactgacattgaatatgaa

SEQ ID NO: 301862 - DNA, 21 bp, Artificial sequence
  SiRNA target sequence
agactgacattgaatatgaag

SEQ ID NO: 301863 - DNA, 21 bp, Artificial sequence
  SiRNA target sequence
gactgacattgaatatgaaga

SEQ ID NO: 301864 - DNA, 21 bp, Artificial sequence
  SiRNA target sequence
actgacattgaatatgaagac

SEQ ID NO: 301865 - DNA, 21 bp, Artificial sequence
  SiRNA target sequence
ctgacattgaatatgaagact

SEQ ID NO: 301866 - DNA, 21 bp, Artificial sequence
  SiRNA target sequence
tgacattgaatatgaagactt

SEQ ID NO: 301867 - DNA, 21 bp, Artificial sequence
  SiRNA target sequence
gacattgaatatgaagacttt

SEQ ID NO: 301868 - DNA, 21 bp, Artificial sequence
  SiRNA target sequence
acattgaatatgaagactttt

SEQ ID NO: 301869 - DNA, 21 bp, Artificial sequence
  SiRNA target sequence
cattgaatatgaagacttttt

SEQ ID NO: 301870 - DNA, 21 bp, Artificial sequence
  SiRNA target sequence
attgaatatgaagacttttta

SEQ ID NO: 301871 - DNA, 21 bp, Artificial sequence
  SiRNA target sequence
ttgaatatgaagactttttag

SEQ ID NO: 301872 - DNA, 21 bp, Artificial sequence
  SiRNA target sequence
tgaatatgaagactttttaga

SEQ ID NO: 301873 - DNA, 21 bp, Artificial sequence
  SiRNA target sequence
gaatatgaagactttttagat

SEQ ID NO: 301874 - DNA, 21 bp, Artificial sequence
  SiRNA target sequence
aatatgaagactttttagata

SEQ ID NO: 301875 - DNA, 21 bp, Artificial sequence
  SiRNA target sequence
atatgaagactttttagatat

SEQ ID NO: 301876 - DNA, 21 bp, Artificial sequence
  SiRNA target sequence
tatgaagactttttagatatg

SEQ ID NO: 301877 - DNA, 21 bp, Artificial sequence
  SiRNA target sequence
atgaagactttttagatatgt

SEQ ID NO: 301878 - DNA, 21 bp, Artificial sequence
  SiRNA target sequence
tgaagactttttagatatgtg

SEQ ID NO: 301879 - DNA, 21 bp, Artificial sequence
  SiRNA target sequence
gaagactttttagatatgtgc

SEQ ID NO: 301880 - DNA, 21 bp, Artificial sequence
  SiRNA target sequence
aagactttttagatatgtgct

SEQ ID NO: 301881 - DNA, 21 bp, Artificial sequence
  SiRNA target sequence
agactttttagatatgtgctt

SEQ ID NO: 301882 - DNA, 21 bp, Artificial sequence
  SiRNA target sequence
gactttttagatatgtgcttg

SEQ ID NO: 301883 - DNA, 21 bp, Artificial sequence
  SiRNA target sequence
actttttagatatgtgcttgg

SEQ ID NO: 301884 - DNA, 21 bp, Artificial sequence
  SiRNA target sequence
ctttttagatatgtgcttgga

SEQ ID NO: 301885 - DNA, 21 bp, Artificial sequence
  SiRNA target sequence
tttttagatatgtgcttggag

SEQ ID NO: 301886 - DNA, 21 bp, Artificial sequence
  SiRNA target sequence
ttttagatatgtgcttggaga

SEQ ID NO: 301887 - DNA, 21 bp, Artificial sequence
  SiRNA target sequence
tttagatatgtgcttggagaa

SEQ ID NO: 301888 - DNA, 21 bp, Artificial sequence
  SiRNA target sequence
ttagatatgtgcttggagaaa

SEQ ID NO: 301889 - DNA, 21 bp, Artificial sequence
  SiRNA target sequence
tagatatgtgcttggagaaaa

SEQ ID NO: 301890 - DNA, 21 bp, Artificial sequence
  SiRNA target sequence
agatatgtgcttggagaaaac

SEQ ID NO: 301891 - DNA, 21 bp, Artificial sequence
  SiRNA target sequence
gatatgtgcttggagaaaacc

SEQ ID NO: 301892 - DNA, 21 bp, Artificial sequence
  SiRNA target sequence
atatgtgcttggagaaaacca

SEQ ID NO: 301893 - DNA, 21 bp, Artificial sequence
  SiRNA target sequence
tatgtgcttggagaaaaccaa

SEQ ID NO: 301894 - DNA, 21 bp, Artificial sequence
  SiRNA target sequence
atgtgcttggagaaaaccaag

SEQ ID NO: 301895 - DNA, 21 bp, Artificial sequence
  SiRNA target sequence
tgtgcttggagaaaaccaaga

SEQ ID NO: 301896 - DNA, 21 bp, Artificial sequence
  SiRNA target sequence
gtgcttggagaaaaccaagac

SEQ ID NO: 301897 - DNA, 21 bp, Artificial sequence
  SiRNA target sequence
tgcttggagaaaaccaagacg

SEQ ID NO: 301898 - DNA, 21 bp, Artificial sequence
  SiRNA target sequence
gcttggagaaaaccaagacgt

SEQ ID NO: 301899 - DNA, 21 bp, Artificial sequence
  SiRNA target sequence
cttggagaaaaccaagacgtg

SEQ ID NO: 301900 - DNA, 21 bp, Artificial sequence
  SiRNA target sequence
ttggagaaaaccaagacgtgt

SEQ ID NO: 301901 - DNA, 21 bp, Artificial sequence
  SiRNA target sequence
tggagaaaaccaagacgtgtc

SEQ ID NO: 301902 - DNA, 21 bp, Artificial sequence
  SiRNA target sequence
ggagaaaaccaagacgtgtcg

SEQ ID NO: 301903 - DNA, 21 bp, Artificial sequence
  SiRNA target sequence
gagaaaaccaagacgtgtcga

SEQ ID NO: 301904 - DNA, 21 bp, Artificial sequence
  SiRNA target sequence
agaaaaccaagacgtgtcgag

SEQ ID NO: 301905 - DNA, 21 bp, Artificial sequence
  SiRNA target sequence
gaaaaccaagacgtgtcgaga

SEQ ID NO: 301906 - DNA, 21 bp, Artificial sequence
  SiRNA target sequence
aaaaccaagacgtgtcgagat

SEQ ID NO: 301907 - DNA, 21 bp, Artificial sequence
  SiRNA target sequence
aaaccaagacgtgtcgagatg

SEQ ID NO: 301908 - DNA, 21 bp, Artificial sequence
  SiRNA target sequence
aaccaagacgtgtcgagatga

SEQ ID NO: 301909 - DNA, 21 bp, Artificial sequence
  SiRNA target sequence
accaagacgtgtcgagatgag

SEQ ID NO: 301910 - DNA, 21 bp, Artificial sequence
  SiRNA target sequence
ccaagacgtgtcgagatgagt

SEQ ID NO: 301911 - DNA, 21 bp, Artificial sequence
  SiRNA target sequence
caagacgtgtcgagatgagtc

SEQ ID NO: 301912 - DNA, 21 bp, Artificial sequence
  SiRNA target sequence
aagacgtgtcgagatgagtct

SEQ ID NO: 301913 - DNA, 21 bp, Artificial sequence
  SiRNA target sequence
agacgtgtcgagatgagtctg

SEQ ID NO: 301914 - DNA, 21 bp, Artificial sequence
  SiRNA target sequence
gacgtgtcgagatgagtctgc

SEQ ID NO: 301915 - DNA, 21 bp, Artificial sequence
  SiRNA target sequence
acgtgtcgagatgagtctgcc

SEQ ID NO: 301916 - DNA, 21 bp, Artificial sequence
  SiRNA target sequence
cgtgtcgagatgagtctgcca

SEQ ID NO: 301917 - DNA, 21 bp, Artificial sequence
  SiRNA target sequence
gtgtcgagatgagtctgccaa

SEQ ID NO: 301918 - DNA, 21 bp, Artificial sequence
  SiRNA target sequence
tgtcgagatgagtctgccaaa

SEQ ID NO: 301919 - DNA, 21 bp, Artificial sequence
  SiRNA target sequence
gtcgagatgagtctgccaaac

SEQ ID NO: 301920 - DNA, 21 bp, Artificial sequence
  SiRNA target sequence
tcgagatgagtctgccaaact

SEQ ID NO: 301921 - DNA, 21 bp, Artificial sequence
  SiRNA target sequence
cgagatgagtctgccaaactc

SEQ ID NO: 301922 - DNA, 21 bp, Artificial sequence
  SiRNA target sequence
gagatgagtctgccaaactca

SEQ ID NO: 301923 - DNA, 21 bp, Artificial sequence
  SiRNA target sequence
agatgagtctgccaaactcaa

SEQ ID NO: 301924 - DNA, 21 bp, Artificial sequence
  SiRNA target sequence
gatgagtctgccaaactcaat

SEQ ID NO: 301925 - DNA, 21 bp, Artificial sequence
  SiRNA target sequence
atgagtctgccaaactcaatg

SEQ ID NO: 301926 - DNA, 21 bp, Artificial sequence
  SiRNA target sequence
tgagtctgccaaactcaatga

SEQ ID NO: 301927 - DNA, 21 bp, Artificial sequence
  SiRNA target sequence
gagtctgccaaactcaatgaa

SEQ ID NO: 301928 - DNA, 21 bp, Artificial sequence
  SiRNA target sequence
agtctgccaaactcaatgaat

SEQ ID NO: 301929 - DNA, 21 bp, Artificial sequence
  SiRNA target sequence
gtctgccaaactcaatgaatt

SEQ ID NO: 301930 - DNA, 21 bp, Artificial sequence
  SiRNA target sequence
tctgccaaactcaatgaattt

SEQ ID NO: 301931 - DNA, 21 bp, Artificial sequence
  SiRNA target sequence
ctgccaaactcaatgaatttc

SEQ ID NO: 301932 - DNA, 21 bp, Artificial sequence
  SiRNA target sequence
tgccaaactcaatgaatttct

SEQ ID NO: 301933 - DNA, 21 bp, Artificial sequence
  SiRNA target sequence
gccaaactcaatgaatttctt

SEQ ID NO: 301934 - DNA, 21 bp, Artificial sequence
  SiRNA target sequence
ccaaactcaatgaatttctta

SEQ ID NO: 301935 - DNA, 21 bp, Artificial sequence
  SiRNA target sequence
caaactcaatgaatttcttat

SEQ ID NO: 301936 - DNA, 21 bp, Artificial sequence
  SiRNA target sequence
aaactcaatgaatttcttatg

SEQ ID NO: 301937 - DNA, 21 bp, Artificial sequence
  SiRNA target sequence
aactcaatgaatttcttatga

SEQ ID NO: 301938 - DNA, 21 bp, Artificial sequence
  SiRNA target sequence
actcaatgaatttcttatgaa

SEQ ID NO: 301939 - DNA, 21 bp, Artificial sequence
  SiRNA target sequence
ctcaatgaatttcttatgaat

SEQ ID NO: 301940 - DNA, 21 bp, Artificial sequence
  SiRNA target sequence
tcaatgaatttcttatgaatt

SEQ ID NO: 301941 - DNA, 21 bp, Artificial sequence
  SiRNA target sequence
caatgaatttcttatgaatta

SEQ ID NO: 301942 - DNA, 21 bp, Artificial sequence
  SiRNA target sequence
aatgaatttcttatgaattat

SEQ ID NO: 301943 - DNA, 21 bp, Artificial sequence
  SiRNA target sequence
atgaatttcttatgaattatg

SEQ ID NO: 301944 - DNA, 21 bp, Artificial sequence
  SiRNA target sequence
tgaatttcttatgaattatgc

SEQ ID NO: 301945 - DNA, 21 bp, Artificial sequence
  SiRNA target sequence
gaatttcttatgaattatgct

SEQ ID NO: 301946 - DNA, 21 bp, Artificial sequence
  SiRNA target sequence
aatttcttatgaattatgctg

SEQ ID NO: 301947 - DNA, 21 bp, Artificial sequence
  SiRNA target sequence
atttcttatgaattatgctga

SEQ ID NO: 301948 - DNA, 21 bp, Artificial sequence
  SiRNA target sequence
tttcttatgaattatgctgaa

SEQ ID NO: 301949 - DNA, 21 bp, Artificial sequence
  SiRNA target sequence
ttcttatgaattatgctgaac

SEQ ID NO: 301950 - DNA, 21 bp, Artificial sequence
  SiRNA target sequence
tcttatgaattatgctgaaca

SEQ ID NO: 301951 - DNA, 21 bp, Artificial sequence
  SiRNA target sequence
cttatgaattatgctgaacaa

SEQ ID NO: 301952 - DNA, 21 bp, Artificial sequence
  SiRNA target sequence
ttatgaattatgctgaacaac

SEQ ID NO: 301953 - DNA, 21 bp, Artificial sequence
  SiRNA target sequence
tatgaattatgctgaacaacg

SEQ ID NO: 301954 - DNA, 21 bp, Artificial sequence
  SiRNA target sequence
atgaattatgctgaacaacgc

SEQ ID NO: 301955 - DNA, 21 bp, Artificial sequence
  SiRNA target sequence
tgaattatgctgaacaacgca

SEQ ID NO: 301956 - DNA, 21 bp, Artificial sequence
  SiRNA target sequence
gaattatgctgaacaacgcaa

SEQ ID NO: 301957 - DNA, 21 bp, Artificial sequence
  SiRNA target sequence
aattatgctgaacaacgcaaa

SEQ ID NO: 301958 - DNA, 21 bp, Artificial sequence
  SiRNA target sequence
attatgctgaacaacgcaaag

SEQ ID NO: 301959 - DNA, 21 bp, Artificial sequence
  SiRNA target sequence
ttatgctgaacaacgcaaaga

SEQ ID NO: 301960 - DNA, 21 bp, Artificial sequence
  SiRNA target sequence
tatgctgaacaacgcaaagac

SEQ ID NO: 301961 - DNA, 21 bp, Artificial sequence
  SiRNA target sequence
atgctgaacaacgcaaagaca

SEQ ID NO: 301962 - DNA, 21 bp, Artificial sequence
  SiRNA target sequence
tgctgaacaacgcaaagacag

SEQ ID NO: 301963 - DNA, 21 bp, Artificial sequence
  SiRNA target sequence
gctgaacaacgcaaagacaga

SEQ ID NO: 301964 - DNA, 21 bp, Artificial sequence
  SiRNA target sequence
ctgaacaacgcaaagacagaa

SEQ ID NO: 301965 - DNA, 21 bp, Artificial sequence
  SiRNA target sequence
tgaacaacgcaaagacagaag

SEQ ID NO: 301966 - DNA, 21 bp, Artificial sequence
  SiRNA target sequence
gaacaacgcaaagacagaagt

SEQ ID NO: 301967 - DNA, 21 bp, Artificial sequence
  SiRNA target sequence
aacaacgcaaagacagaagta

SEQ ID NO: 301968 - DNA, 21 bp, Artificial sequence
  SiRNA target sequence
acaacgcaaagacagaagtag

SEQ ID NO: 301969 - DNA, 21 bp, Artificial sequence
  SiRNA target sequence
caacgcaaagacagaagtaga

SEQ ID NO: 301970 - DNA, 21 bp, Artificial sequence
  SiRNA target sequence
aacgcaaagacagaagtagag

SEQ ID NO: 301971 - DNA, 21 bp, Artificial sequence
  SiRNA target sequence
acgcaaagacagaagtagaga

SEQ ID NO: 301972 - DNA, 21 bp, Artificial sequence
  SiRNA target sequence
cgcaaagacagaagtagagat

SEQ ID NO: 301973 - DNA, 21 bp, Artificial sequence
  SiRNA target sequence
gcaaagacagaagtagagata

SEQ ID NO: 301974 - DNA, 21 bp, Artificial sequence
  SiRNA target sequence
caaagacagaagtagagatac

SEQ ID NO: 301975 - DNA, 21 bp, Artificial sequence
  SiRNA target sequence
aaagacagaagtagagatact

SEQ ID NO: 301976 - DNA, 21 bp, Artificial sequence
  SiRNA target sequence
aagacagaagtagagatactt

SEQ ID NO: 301977 - DNA, 21 bp, Artificial sequence
  SiRNA target sequence
agacagaagtagagatacttt

SEQ ID NO: 301978 - DNA, 21 bp, Artificial sequence
  SiRNA target sequence
gacagaagtagagatactttt

SEQ ID NO: 301979 - DNA, 21 bp, Artificial sequence
  SiRNA target sequence
acagaagtagagatactttta

SEQ ID NO: 301980 - DNA, 21 bp, Artificial sequence
  SiRNA target sequence
cagaagtagagatacttttat

SEQ ID NO: 301981 - DNA, 21 bp, Artificial sequence
  SiRNA target sequence
agaagtagagatacttttatc

SEQ ID NO: 301982 - DNA, 21 bp, Artificial sequence
  SiRNA target sequence
gaagtagagatacttttatcc

SEQ ID NO: 301983 - DNA, 21 bp, Artificial sequence
  SiRNA target sequence
aagtagagatacttttatcca

SEQ ID NO: 301984 - DNA, 21 bp, Artificial sequence
  SiRNA target sequence
agtagagatacttttatccat

SEQ ID NO: 301985 - DNA, 21 bp, Artificial sequence
  SiRNA target sequence
gtagagatacttttatccatc

SEQ ID NO: 301986 - DNA, 21 bp, Artificial sequence
  SiRNA target sequence
tagagatacttttatccatcc

SEQ ID NO: 301987 - DNA, 21 bp, Artificial sequence
  SiRNA target sequence
agagatacttttatccatcct

SEQ ID NO: 301988 - DNA, 21 bp, Artificial sequence
  SiRNA target sequence
gagatacttttatccatcctg

SEQ ID NO: 301989 - DNA, 21 bp, Artificial sequence
  SiRNA target sequence
agatacttttatccatcctga

SEQ ID NO: 301990 - DNA, 21 bp, Artificial sequence
  SiRNA target sequence
gatacttttatccatcctgaa

SEQ ID NO: 301991 - DNA, 21 bp, Artificial sequence
  SiRNA target sequence
atacttttatccatcctgaac

SEQ ID NO: 301992 - DNA, 21 bp, Artificial sequence
  SiRNA target sequence
tacttttatccatcctgaacc

SEQ ID NO: 301993 - DNA, 21 bp, Artificial sequence
  SiRNA target sequence
acttttatccatcctgaacct

SEQ ID NO: 301994 - DNA, 21 bp, Artificial sequence
  SiRNA target sequence
cttttatccatcctgaacctg

SEQ ID NO: 301995 - DNA, 21 bp, Artificial sequence
  SiRNA target sequence
ttttatccatcctgaacctga

SEQ ID NO: 301996 - DNA, 21 bp, Artificial sequence
  SiRNA target sequence
tttatccatcctgaacctgaa

SEQ ID NO: 301997 - DNA, 21 bp, Artificial sequence
  SiRNA target sequence
ttatccatcctgaacctgaat

SEQ ID NO: 301998 - DNA, 21 bp, Artificial sequence
  SiRNA target sequence
tatccatcctgaacctgaata

SEQ ID NO: 301999 - DNA, 21 bp, Artificial sequence
  SiRNA target sequence
atccatcctgaacctgaatat

SEQ ID NO: 302000 - DNA, 21 bp, Artificial sequence
  SiRNA target sequence
tccatcctgaacctgaatatg

SEQ ID NO: 302001 - DNA, 21 bp, Artificial sequence
  SiRNA target sequence
ccatcctgaacctgaatatga

SEQ ID NO: 302002 - DNA, 21 bp, Artificial sequence
  SiRNA target sequence
catcctgaacctgaatatgac

SEQ ID NO: 302003 - DNA, 21 bp, Artificial sequence
  SiRNA target sequence
atcctgaacctgaatatgacg

SEQ ID NO: 302004 - DNA, 21 bp, Artificial sequence
  SiRNA target sequence
tcctgaacctgaatatgacga

SEQ ID NO: 302005 - DNA, 21 bp, Artificial sequence
  SiRNA target sequence
cctgaacctgaatatgacgat

SEQ ID NO: 302006 - DNA, 21 bp, Artificial sequence
  SiRNA target sequence
ctgaacctgaatatgacgatg

SEQ ID NO: 302007 - DNA, 21 bp, Artificial sequence
  SiRNA target sequence
tgaacctgaatatgacgatga

SEQ ID NO: 302008 - DNA, 21 bp, Artificial sequence
  SiRNA target sequence
gaacctgaatatgacgatgat

SEQ ID NO: 302009 - DNA, 21 bp, Artificial sequence
  SiRNA target sequence
aacctgaatatgacgatgatg

SEQ ID NO: 302010 - DNA, 21 bp, Artificial sequence
  SiRNA target sequence
acctgaatatgacgatgatga

SEQ ID NO: 302011 - DNA, 21 bp, Artificial sequence
  SiRNA target sequence
cctgaatatgacgatgatgag

SEQ ID NO: 302012 - DNA, 21 bp, Artificial sequence
  SiRNA target sequence
ctgaatatgacgatgatgagt

SEQ ID NO: 302013 - DNA, 21 bp, Artificial sequence
  SiRNA target sequence
tgaatatgacgatgatgagtt

SEQ ID NO: 302014 - DNA, 21 bp, Artificial sequence
  SiRNA target sequence
gaatatgacgatgatgagttc

SEQ ID NO: 302015 - DNA, 21 bp, Artificial sequence
  SiRNA target sequence
aatatgacgatgatgagttca

SEQ ID NO: 302016 - DNA, 21 bp, Artificial sequence
  SiRNA target sequence
atatgacgatgatgagttcaa

SEQ ID NO: 302017 - DNA, 21 bp, Artificial sequence
  SiRNA target sequence
tatgacgatgatgagttcaag

SEQ ID NO: 302018 - DNA, 21 bp, Artificial sequence
  SiRNA target sequence
atgacgatgatgagttcaagg

SEQ ID NO: 302019 - DNA, 21 bp, Artificial sequence
  SiRNA target sequence
tgacgatgatgagttcaagga

SEQ ID NO: 302020 - DNA, 21 bp, Artificial sequence
  SiRNA target sequence
gacgatgatgagttcaaggac

SEQ ID NO: 302021 - DNA, 21 bp, Artificial sequence
  SiRNA target sequence
acgatgatgagttcaaggaca

SEQ ID NO: 302022 - DNA, 21 bp, Artificial sequence
  SiRNA target sequence
cgatgatgagttcaaggacac

SEQ ID NO: 302023 - DNA, 21 bp, Artificial sequence
  SiRNA target sequence
gatgatgagttcaaggacaca

SEQ ID NO: 302024 - DNA, 21 bp, Artificial sequence
  SiRNA target sequence
atgatgagttcaaggacacat

SEQ ID NO: 302025 - DNA, 21 bp, Artificial sequence
  SiRNA target sequence
tgatgagttcaaggacacatt

SEQ ID NO: 302026 - DNA, 21 bp, Artificial sequence
  SiRNA target sequence
gatgagttcaaggacacatta

SEQ ID NO: 302027 - DNA, 21 bp, Artificial sequence
  SiRNA target sequence
atgagttcaaggacacattag

SEQ ID NO: 302028 - DNA, 21 bp, Artificial sequence
  SiRNA target sequence
tgagttcaaggacacattaga

SEQ ID NO: 302029 - DNA, 21 bp, Artificial sequence
  SiRNA target sequence
gagttcaaggacacattagaa

SEQ ID NO: 302030 - DNA, 21 bp, Artificial sequence
  SiRNA target sequence
agttcaaggacacattagaag

SEQ ID NO: 302031 - DNA, 21 bp, Artificial sequence
  SiRNA target sequence
gttcaaggacacattagaagt

SEQ ID NO: 302032 - DNA, 21 bp, Artificial sequence
  SiRNA target sequence
ttcaaggacacattagaagta

SEQ ID NO: 302033 - DNA, 21 bp, Artificial sequence
  SiRNA target sequence
tcaaggacacattagaagtac

SEQ ID NO: 302034 - DNA, 21 bp, Artificial sequence
  SiRNA target sequence
caaggacacattagaagtaca

SEQ ID NO: 302035 - DNA, 21 bp, Artificial sequence
  SiRNA target sequence
aaggacacattagaagtacag

SEQ ID NO: 302036 - DNA, 21 bp, Artificial sequence
  SiRNA target sequence
aggacacattagaagtacaga

SEQ ID NO: 302037 - DNA, 21 bp, Artificial sequence
  SiRNA target sequence
ggacacattagaagtacagat

SEQ ID NO: 302038 - DNA, 21 bp, Artificial sequence
  SiRNA target sequence
gacacattagaagtacagatg

SEQ ID NO: 302039 - DNA, 21 bp, Artificial sequence
  SiRNA target sequence
acacattagaagtacagatgc

SEQ ID NO: 302040 - DNA, 21 bp, Artificial sequence
  SiRNA target sequence
cacattagaagtacagatgca

SEQ ID NO: 302041 - DNA, 21 bp, Artificial sequence
  SiRNA target sequence
acattagaagtacagatgcaa

SEQ ID NO: 302042 - DNA, 21 bp, Artificial sequence
  SiRNA target sequence
cattagaagtacagatgcaaa

SEQ ID NO: 302043 - DNA, 21 bp, Artificial sequence
  SiRNA target sequence
attagaagtacagatgcaaat

SEQ ID NO: 302044 - DNA, 21 bp, Artificial sequence
  SiRNA target sequence
ttagaagtacagatgcaaatt

SEQ ID NO: 302045 - DNA, 21 bp, Artificial sequence
  SiRNA target sequence
tagaagtacagatgcaaattg

SEQ ID NO: 302046 - DNA, 21 bp, Artificial sequence
  SiRNA target sequence
agaagtacagatgcaaattga

SEQ ID NO: 302047 - DNA, 21 bp, Artificial sequence
  SiRNA target sequence
gaagtacagatgcaaattgat

SEQ ID NO: 302048 - DNA, 21 bp, Artificial sequence
  SiRNA target sequence
aagtacagatgcaaattgatg

SEQ ID NO: 302049 - DNA, 21 bp, Artificial sequence
  SiRNA target sequence
agtacagatgcaaattgatgc

SEQ ID NO: 302050 - DNA, 21 bp, Artificial sequence
  SiRNA target sequence
gtacagatgcaaattgatgct

SEQ ID NO: 302051 - DNA, 21 bp, Artificial sequence
  SiRNA target sequence
tacagatgcaaattgatgctc

SEQ ID NO: 302052 - DNA, 21 bp, Artificial sequence
  SiRNA target sequence
acagatgcaaattgatgctcc

SEQ ID NO: 302053 - DNA, 21 bp, Artificial sequence
  SiRNA target sequence
cagatgcaaattgatgctcct

SEQ ID NO: 302054 - DNA, 21 bp, Artificial sequence
  SiRNA target sequence
agatgcaaattgatgctccta

SEQ ID NO: 302055 - DNA, 21 bp, Artificial sequence
  SiRNA target sequence
gatgcaaattgatgctcctaa

SEQ ID NO: 302056 - DNA, 21 bp, Artificial sequence
  SiRNA target sequence
atgcaaattgatgctcctaat

SEQ ID NO: 302057 - DNA, 21 bp, Artificial sequence
  SiRNA target sequence
tgcaaattgatgctcctaatg

SEQ ID NO: 302058 - DNA, 21 bp, Artificial sequence
  SiRNA target sequence
gcaaattgatgctcctaatga

SEQ ID NO: 302059 - DNA, 21 bp, Artificial sequence
  SiRNA target sequence
caaattgatgctcctaatgat

SEQ ID NO: 302060 - DNA, 21 bp, Artificial sequence
  SiRNA target sequence
aaattgatgctcctaatgatg

SEQ ID NO: 302061 - DNA, 21 bp, Artificial sequence
  SiRNA target sequence
aattgatgctcctaatgatga

SEQ ID NO: 302062 - DNA, 21 bp, Artificial sequence
  SiRNA target sequence
attgatgctcctaatgatgac

SEQ ID NO: 302063 - DNA, 21 bp, Artificial sequence
  SiRNA target sequence
ttgatgctcctaatgatgacc

SEQ ID NO: 302064 - DNA, 21 bp, Artificial sequence
  SiRNA target sequence
tgatgctcctaatgatgacct

SEQ ID NO: 302065 - DNA, 21 bp, Artificial sequence
  SiRNA target sequence
gatgctcctaatgatgacctt

SEQ ID NO: 302066 - DNA, 21 bp, Artificial sequence
  SiRNA target sequence
atgctcctaatgatgaccttg

SEQ ID NO: 302067 - DNA, 21 bp, Artificial sequence
  SiRNA target sequence
tgctcctaatgatgaccttgt

SEQ ID NO: 302068 - DNA, 21 bp, Artificial sequence
  SiRNA target sequence
gctcctaatgatgaccttgtt

SEQ ID NO: 302069 - DNA, 21 bp, Artificial sequence
  SiRNA target sequence
ctcctaatgatgaccttgttc

SEQ ID NO: 302070 - DNA, 21 bp, Artificial sequence
  SiRNA target sequence
tcctaatgatgaccttgttct

SEQ ID NO: 302071 - DNA, 21 bp, Artificial sequence
  SiRNA target sequence
cctaatgatgaccttgttctc

SEQ ID NO: 302072 - DNA, 21 bp, Artificial sequence
  SiRNA target sequence
ctaatgatgaccttgttctca

SEQ ID NO: 302073 - DNA, 21 bp, Artificial sequence
  SiRNA target sequence
taatgatgaccttgttctcat

SEQ ID NO: 302074 - DNA, 21 bp, Artificial sequence
  SiRNA target sequence
aatgatgaccttgttctcatt

SEQ ID NO: 302075 - DNA, 21 bp, Artificial sequence
  SiRNA target sequence
atgatgaccttgttctcattg

SEQ ID NO: 302076 - DNA, 21 bp, Artificial sequence
  SiRNA target sequence
tgatgaccttgttctcattga

SEQ ID NO: 302077 - DNA, 21 bp, Artificial sequence
  SiRNA target sequence
gatgaccttgttctcattgaa

SEQ ID NO: 302078 - DNA, 21 bp, Artificial sequence
  SiRNA target sequence
atgaccttgttctcattgaac

SEQ ID NO: 302079 - DNA, 21 bp, Artificial sequence
  SiRNA target sequence
tgaccttgttctcattgaaca

SEQ ID NO: 302080 - DNA, 21 bp, Artificial sequence
  SiRNA target sequence
gaccttgttctcattgaacaa

SEQ ID NO: 302081 - DNA, 21 bp, Artificial sequence
  SiRNA target sequence
accttgttctcattgaacaag

SEQ ID NO: 302082 - DNA, 21 bp, Artificial sequence
  SiRNA target sequence
ccttgttctcattgaacaaga

SEQ ID NO: 302083 - DNA, 21 bp, Artificial sequence
  SiRNA target sequence
cttgttctcattgaacaagat

SEQ ID NO: 302084 - DNA, 21 bp, Artificial sequence
  SiRNA target sequence
ttgttctcattgaacaagata

SEQ ID NO: 302085 - DNA, 21 bp, Artificial sequence
  SiRNA target sequence
tgttctcattgaacaagatag

SEQ ID NO: 302086 - DNA, 21 bp, Artificial sequence
  SiRNA target sequence
gttctcattgaacaagataga

SEQ ID NO: 302087 - DNA, 21 bp, Artificial sequence
  SiRNA target sequence
ttctcattgaacaagatagat

SEQ ID NO: 302088 - DNA, 21 bp, Artificial sequence
  SiRNA target sequence
tctcattgaacaagatagatt

SEQ ID NO: 302089 - DNA, 21 bp, Artificial sequence
  SiRNA target sequence
ctcattgaacaagatagattg

SEQ ID NO: 302090 - DNA, 21 bp, Artificial sequence
  SiRNA target sequence
tcattgaacaagatagattgc

SEQ ID NO: 302091 - DNA, 21 bp, Artificial sequence
  SiRNA target sequence
cattgaacaagatagattgcg

SEQ ID NO: 302092 - DNA, 21 bp, Artificial sequence
  SiRNA target sequence
attgaacaagatagattgcga

SEQ ID NO: 302093 - DNA, 21 bp, Artificial sequence
  SiRNA target sequence
ttgaacaagatagattgcgag

SEQ ID NO: 302094 - DNA, 21 bp, Artificial sequence
  SiRNA target sequence
tgaacaagatagattgcgaga

SEQ ID NO: 302095 - DNA, 21 bp, Artificial sequence
  SiRNA target sequence
gaacaagatagattgcgagag

SEQ ID NO: 302096 - DNA, 21 bp, Artificial sequence
  SiRNA target sequence
aacaagatagattgcgagaga

SEQ ID NO: 302097 - DNA, 21 bp, Artificial sequence
  SiRNA target sequence
acaagatagattgcgagagat

SEQ ID NO: 302098 - DNA, 21 bp, Artificial sequence
  SiRNA target sequence
caagatagattgcgagagatg

SEQ ID NO: 302099 - DNA, 21 bp, Artificial sequence
  SiRNA target sequence
aagatagattgcgagagatga

SEQ ID NO: 302100 - DNA, 21 bp, Artificial sequence
  SiRNA target sequence
agatagattgcgagagatgat

SEQ ID NO: 302101 - DNA, 21 bp, Artificial sequence
  SiRNA target sequence
gatagattgcgagagatgatt

SEQ ID NO: 302102 - DNA, 21 bp, Artificial sequence
  SiRNA target sequence
atagattgcgagagatgattg

SEQ ID NO: 302103 - DNA, 21 bp, Artificial sequence
  SiRNA target sequence
tagattgcgagagatgattga

SEQ ID NO: 302104 - DNA, 21 bp, Artificial sequence
  SiRNA target sequence
agattgcgagagatgattgat

SEQ ID NO: 302105 - DNA, 21 bp, Artificial sequence
  SiRNA target sequence
gattgcgagagatgattgatt

SEQ ID NO: 302106 - DNA, 21 bp, Artificial sequence
  SiRNA target sequence
attgcgagagatgattgattc

SEQ ID NO: 302107 - DNA, 21 bp, Artificial sequence
  SiRNA target sequence
ttgcgagagatgattgattca

SEQ ID NO: 302108 - DNA, 21 bp, Artificial sequence
  SiRNA target sequence
tgcgagagatgattgattcat

SEQ ID NO: 302109 - DNA, 21 bp, Artificial sequence
  SiRNA target sequence
gcgagagatgattgattcatg

SEQ ID NO: 302110 - DNA, 21 bp, Artificial sequence
  SiRNA target sequence
cgagagatgattgattcatgt

SEQ ID NO: 302111 - DNA, 21 bp, Artificial sequence
  SiRNA target sequence
gagagatgattgattcatgta

SEQ ID NO: 302112 - DNA, 21 bp, Artificial sequence
  SiRNA target sequence
agagatgattgattcatgtac

SEQ ID NO: 302113 - DNA, 21 bp, Artificial sequence
  SiRNA target sequence
gagatgattgattcatgtacc

SEQ ID NO: 302114 - DNA, 21 bp, Artificial sequence
  SiRNA target sequence
agatgattgattcatgtaccg

SEQ ID NO: 302115 - DNA, 21 bp, Artificial sequence
  SiRNA target sequence
gatgattgattcatgtaccgg

SEQ ID NO: 302116 - DNA, 21 bp, Artificial sequence
  SiRNA target sequence
atgattgattcatgtaccggt

SEQ ID NO: 302117 - DNA, 21 bp, Artificial sequence
  SiRNA target sequence
tgattgattcatgtaccggtg

SEQ ID NO: 302118 - DNA, 21 bp, Artificial sequence
  SiRNA target sequence
gattgattcatgtaccggtgt

SEQ ID NO: 302119 - DNA, 21 bp, Artificial sequence
  SiRNA target sequence
attgattcatgtaccggtgtt

SEQ ID NO: 302120 - DNA, 21 bp, Artificial sequence
  SiRNA target sequence
ttgattcatgtaccggtgttg

SEQ ID NO: 302121 - DNA, 21 bp, Artificial sequence
  SiRNA target sequence
tgattcatgtaccggtgttgt

SEQ ID NO: 302122 - DNA, 21 bp, Artificial sequence
  SiRNA target sequence
gattcatgtaccggtgttgtt

SEQ ID NO: 302123 - DNA, 21 bp, Artificial sequence
  SiRNA target sequence
attcatgtaccggtgttgttt

SEQ ID NO: 302124 - DNA, 21 bp, Artificial sequence
  SiRNA target sequence
ttcatgtaccggtgttgttta

SEQ ID NO: 302125 - DNA, 21 bp, Artificial sequence
  SiRNA target sequence
tcatgtaccggtgttgtttat

SEQ ID NO: 302126 - DNA, 21 bp, Artificial sequence
  SiRNA target sequence
catgtaccggtgttgtttatg

SEQ ID NO: 302127 - DNA, 21 bp, Artificial sequence
  SiRNA target sequence
atgtaccggtgttgtttatga

SEQ ID NO: 302128 - DNA, 21 bp, Artificial sequence
  SiRNA target sequence
tgtaccggtgttgtttatgat

SEQ ID NO: 302129 - DNA, 21 bp, Artificial sequence
  SiRNA target sequence
gtaccggtgttgtttatgatt

SEQ ID NO: 302130 - DNA, 21 bp, Artificial sequence
  SiRNA target sequence
taccggtgttgtttatgattg

SEQ ID NO: 302131 - DNA, 21 bp, Artificial sequence
  SiRNA target sequence
accggtgttgtttatgattgc

SEQ ID NO: 302132 - DNA, 21 bp, Artificial sequence
  SiRNA target sequence
ccggtgttgtttatgattgca

SEQ ID NO: 302133 - DNA, 21 bp, Artificial sequence
  SiRNA target sequence
cggtgttgtttatgattgcaa

SEQ ID NO: 302134 - DNA, 21 bp, Artificial sequence
  SiRNA target sequence
ggtgttgtttatgattgcaaa

SEQ ID NO: 302135 - DNA, 21 bp, Artificial sequence
  SiRNA target sequence
gtgttgtttatgattgcaaac

SEQ ID NO: 302136 - DNA, 21 bp, Artificial sequence
  SiRNA target sequence
tgttgtttatgattgcaaaca

SEQ ID NO: 302137 - DNA, 21 bp, Artificial sequence
  SiRNA target sequence
gttgtttatgattgcaaacaa

SEQ ID NO: 302138 - DNA, 21 bp, Artificial sequence
  SiRNA target sequence
ttgtttatgattgcaaacaac

SEQ ID NO: 302139 - DNA, 21 bp, Artificial sequence
  SiRNA target sequence
tgtttatgattgcaaacaaca

SEQ ID NO: 302140 - DNA, 21 bp, Artificial sequence
  SiRNA target sequence
gtttatgattgcaaacaacaa

SEQ ID NO: 302141 - DNA, 21 bp, Artificial sequence
  SiRNA target sequence
tttatgattgcaaacaacaag

SEQ ID NO: 302142 - DNA, 21 bp, Artificial sequence
  SiRNA target sequence
ttatgattgcaaacaacaagt

SEQ ID NO: 302143 - DNA, 21 bp, Artificial sequence
  SiRNA target sequence
tatgattgcaaacaacaagta

SEQ ID NO: 302144 - DNA, 21 bp, Artificial sequence
  SiRNA target sequence
atgattgcaaacaacaagtag

SEQ ID NO: 302145 - DNA, 21 bp, Artificial sequence
  SiRNA target sequence
tgattgcaaacaacaagtagt

SEQ ID NO: 302146 - DNA, 21 bp, Artificial sequence
  SiRNA target sequence
gattgcaaacaacaagtagtg

SEQ ID NO: 302147 - DNA, 21 bp, Artificial sequence
  SiRNA target sequence
attgcaaacaacaagtagtga

SEQ ID NO: 302148 - DNA, 21 bp, Artificial sequence
  SiRNA target sequence
ttgcaaacaacaagtagtgaa

SEQ ID NO: 302149 - DNA, 21 bp, Artificial sequence
  SiRNA target sequence
tgcaaacaacaagtagtgaag

SEQ ID NO: 302150 - DNA, 21 bp, Artificial sequence
  SiRNA target sequence
gcaaacaacaagtagtgaaga

SEQ ID NO: 302151 - DNA, 21 bp, Artificial sequence
  SiRNA target sequence
caaacaacaagtagtgaagat

SEQ ID NO: 302152 - DNA, 21 bp, Artificial sequence
  SiRNA target sequence
aaacaacaagtagtgaagata

SEQ ID NO: 302153 - DNA, 21 bp, Artificial sequence
  SiRNA target sequence
aacaacaagtagtgaagatat

SEQ ID NO: 302154 - DNA, 21 bp, Artificial sequence
  SiRNA target sequence
acaacaagtagtgaagatatc

SEQ ID NO: 302155 - DNA, 21 bp, Artificial sequence
  SiRNA target sequence
caacaagtagtgaagatatca

SEQ ID NO: 302156 - DNA, 21 bp, Artificial sequence
  SiRNA target sequence
aacaagtagtgaagatatcaa

SEQ ID NO: 302157 - DNA, 21 bp, Artificial sequence
  SiRNA target sequence
acaagtagtgaagatatcaaa

SEQ ID NO: 302158 - DNA, 21 bp, Artificial sequence
  SiRNA target sequence
caagtagtgaagatatcaaaa

SEQ ID NO: 302159 - DNA, 21 bp, Artificial sequence
  SiRNA target sequence
aagtagtgaagatatcaaaac

SEQ ID NO: 302160 - DNA, 21 bp, Artificial sequence
  SiRNA target sequence
agtagtgaagatatcaaaact

SEQ ID NO: 302161 - DNA, 21 bp, Artificial sequence
  SiRNA target sequence
gtagtgaagatatcaaaactc

SEQ ID NO: 302162 - DNA, 21 bp, Artificial sequence
  SiRNA target sequence
tagtgaagatatcaaaactcg

SEQ ID NO: 302163 - DNA, 21 bp, Artificial sequence
  SiRNA target sequence
agtgaagatatcaaaactcgc

SEQ ID NO: 302164 - DNA, 21 bp, Artificial sequence
  SiRNA target sequence
gtgaagatatcaaaactcgct

SEQ ID NO: 302165 - DNA, 21 bp, Artificial sequence
  SiRNA target sequence
tgaagatatcaaaactcgctt

SEQ ID NO: 302166 - DNA, 21 bp, Artificial sequence
  SiRNA target sequence
gaagatatcaaaactcgcttt

SEQ ID NO: 302167 - DNA, 21 bp, Artificial sequence
  SiRNA target sequence
aagatatcaaaactcgctttt

SEQ ID NO: 302168 - DNA, 21 bp, Artificial sequence
  SiRNA target sequence
agatatcaaaactcgcttttg

SEQ ID NO: 302169 - DNA, 21 bp, Artificial sequence
  SiRNA target sequence
gatatcaaaactcgcttttga

SEQ ID NO: 302170 - DNA, 21 bp, Artificial sequence
  SiRNA target sequence
atatcaaaactcgcttttgat

SEQ ID NO: 302171 - DNA, 21 bp, Artificial sequence
  SiRNA target sequence
tatcaaaactcgcttttgatc

SEQ ID NO: 302172 - DNA, 21 bp, Artificial sequence
  SiRNA target sequence
atcaaaactcgcttttgatct

SEQ ID NO: 302173 - DNA, 21 bp, Artificial sequence
  SiRNA target sequence
tcaaaactcgcttttgatctt

SEQ ID NO: 302174 - DNA, 21 bp, Artificial sequence
  SiRNA target sequence
caaaactcgcttttgatcttg

SEQ ID NO: 302175 - DNA, 21 bp, Artificial sequence
  SiRNA target sequence
aaaactcgcttttgatcttgc

SEQ ID NO: 302176 - DNA, 21 bp, Artificial sequence
  SiRNA target sequence
aaactcgcttttgatcttgcc

SEQ ID NO: 302177 - DNA, 21 bp, Artificial sequence
  SiRNA target sequence
aactcgcttttgatcttgccc

SEQ ID NO: 302178 - DNA, 21 bp, Artificial sequence
  SiRNA target sequence
actcgcttttgatcttgcccc

SEQ ID NO: 302179 - DNA, 21 bp, Artificial sequence
  SiRNA target sequence
ctcgcttttgatcttgcccca

SEQ ID NO: 302180 - DNA, 21 bp, Artificial sequence
  SiRNA target sequence
tcgcttttgatcttgccccat

SEQ ID NO: 302181 - DNA, 21 bp, Artificial sequence
  SiRNA target sequence
cgcttttgatcttgccccatt

SEQ ID NO: 302182 - DNA, 21 bp, Artificial sequence
  SiRNA target sequence
gcttttgatcttgccccatta

SEQ ID NO: 302183 - DNA, 21 bp, Artificial sequence
  SiRNA target sequence
cttttgatcttgccccattag

SEQ ID NO: 302184 - DNA, 21 bp, Artificial sequence
  SiRNA target sequence
ttttgatcttgccccattaga

SEQ ID NO: 302185 - DNA, 21 bp, Artificial sequence
  SiRNA target sequence
tttgatcttgccccattagac

SEQ ID NO: 302186 - DNA, 21 bp, Artificial sequence
  SiRNA target sequence
ttgatcttgccccattagact

SEQ ID NO: 302187 - DNA, 21 bp, Artificial sequence
  SiRNA target sequence
tgatcttgccccattagacta

SEQ ID NO: 302188 - DNA, 21 bp, Artificial sequence
  SiRNA target sequence
gatcttgccccattagactat

SEQ ID NO: 302189 - DNA, 21 bp, Artificial sequence
  SiRNA target sequence
atcttgccccattagactatg

SEQ ID NO: 302190 - DNA, 21 bp, Artificial sequence
  SiRNA target sequence
tcttgccccattagactatga

SEQ ID NO: 302191 - DNA, 21 bp, Artificial sequence
  SiRNA target sequence
cttgccccattagactatgat

SEQ ID NO: 302192 - DNA, 21 bp, Artificial sequence
  SiRNA target sequence
ttgccccattagactatgatg

SEQ ID NO: 302193 - DNA, 21 bp, Artificial sequence
  SiRNA target sequence
tgccccattagactatgatga

SEQ ID NO: 302194 - DNA, 21 bp, Artificial sequence
  SiRNA target sequence
gccccattagactatgatgaa

SEQ ID NO: 302195 - DNA, 21 bp, Artificial sequence
  SiRNA target sequence
ccccattagactatgatgaac

SEQ ID NO: 302196 - DNA, 21 bp, Artificial sequence
  SiRNA target sequence
cccattagactatgatgaaca

SEQ ID NO: 302197 - DNA, 21 bp, Artificial sequence
  SiRNA target sequence
ccattagactatgatgaacaa

SEQ ID NO: 302198 - DNA, 21 bp, Artificial sequence
  SiRNA target sequence
cattagactatgatgaacaaa

SEQ ID NO: 302199 - DNA, 21 bp, Artificial sequence
  SiRNA target sequence
attagactatgatgaacaaat

SEQ ID NO: 302200 - DNA, 21 bp, Artificial sequence
  SiRNA target sequence
ttagactatgatgaacaaatg

SEQ ID NO: 302201 - DNA, 21 bp, Artificial sequence
  SiRNA target sequence
tagactatgatgaacaaatgc

SEQ ID NO: 302202 - DNA, 21 bp, Artificial sequence
  SiRNA target sequence
agactatgatgaacaaatgca

SEQ ID NO: 302203 - DNA, 21 bp, Artificial sequence
  SiRNA target sequence
gactatgatgaacaaatgcaa

SEQ ID NO: 302204 - DNA, 21 bp, Artificial sequence
  SiRNA target sequence
actatgatgaacaaatgcaac

SEQ ID NO: 302205 - DNA, 21 bp, Artificial sequence
  SiRNA target sequence
ctatgatgaacaaatgcaacg

SEQ ID NO: 302206 - DNA, 21 bp, Artificial sequence
  SiRNA target sequence
tatgatgaacaaatgcaacga

SEQ ID NO: 302207 - DNA, 21 bp, Artificial sequence
  SiRNA target sequence
atgatgaacaaatgcaacgaa

SEQ ID NO: 302208 - DNA, 21 bp, Artificial sequence
  SiRNA target sequence
tgatgaacaaatgcaacgaat

SEQ ID NO: 302209 - DNA, 21 bp, Artificial sequence
  SiRNA target sequence
gatgaacaaatgcaacgaatt

SEQ ID NO: 302210 - DNA, 21 bp, Artificial sequence
  SiRNA target sequence
atgaacaaatgcaacgaatta

SEQ ID NO: 302211 - DNA, 21 bp, Artificial sequence
  SiRNA target sequence
tgaacaaatgcaacgaattaa

SEQ ID NO: 302212 - DNA, 21 bp, Artificial sequence
  SiRNA target sequence
gaacaaatgcaacgaattaag

SEQ ID NO: 302213 - DNA, 21 bp, Artificial sequence
  SiRNA target sequence
aacaaatgcaacgaattaagg

SEQ ID NO: 302214 - DNA, 21 bp, Artificial sequence
  SiRNA target sequence
acaaatgcaacgaattaagga

SEQ ID NO: 302215 - DNA, 21 bp, Artificial sequence
  SiRNA target sequence
caaatgcaacgaattaaggaa

SEQ ID NO: 302216 - DNA, 21 bp, Artificial sequence
  SiRNA target sequence
aaatgcaacgaattaaggaaa

SEQ ID NO: 302217 - DNA, 21 bp, Artificial sequence
  SiRNA target sequence
aatgcaacgaattaaggaaat

SEQ ID NO: 302218 - DNA, 21 bp, Artificial sequence
  SiRNA target sequence
atgcaacgaattaaggaaatg

SEQ ID NO: 302219 - DNA, 21 bp, Artificial sequence
  SiRNA target sequence
tgcaacgaattaaggaaatga

SEQ ID NO: 302220 - DNA, 21 bp, Artificial sequence
  SiRNA target sequence
gcaacgaattaaggaaatgaa

SEQ ID NO: 302221 - DNA, 21 bp, Artificial sequence
  SiRNA target sequence
caacgaattaaggaaatgaag

SEQ ID NO: 302222 - DNA, 21 bp, Artificial sequence
  SiRNA target sequence
aacgaattaaggaaatgaagt

SEQ ID NO: 302223 - DNA, 21 bp, Artificial sequence
  SiRNA target sequence
acgaattaaggaaatgaagta

SEQ ID NO: 302224 - DNA, 21 bp, Artificial sequence
  SiRNA target sequence
cgaattaaggaaatgaagtat

SEQ ID NO: 302225 - DNA, 21 bp, Artificial sequence
  SiRNA target sequence
gaattaaggaaatgaagtatt

SEQ ID NO: 302226 - DNA, 21 bp, Artificial sequence
  SiRNA target sequence
aattaaggaaatgaagtatta

SEQ ID NO: 302227 - DNA, 21 bp, Artificial sequence
  SiRNA target sequence
attaaggaaatgaagtattac

SEQ ID NO: 302228 - DNA, 21 bp, Artificial sequence
  SiRNA target sequence
ttaaggaaatgaagtattacc

SEQ ID NO: 302229 - DNA, 21 bp, Artificial sequence
  SiRNA target sequence
taaggaaatgaagtattacca

SEQ ID NO: 302230 - DNA, 21 bp, Artificial sequence
  SiRNA target sequence
aaggaaatgaagtattaccag

SEQ ID NO: 302231 - DNA, 21 bp, Artificial sequence
  SiRNA target sequence
aggaaatgaagtattaccaga

SEQ ID NO: 302232 - DNA, 21 bp, Artificial sequence
  SiRNA target sequence
ggaaatgaagtattaccagaa

SEQ ID NO: 302233 - DNA, 21 bp, Artificial sequence
  SiRNA target sequence
gaaatgaagtattaccagaaa

SEQ ID NO: 302234 - DNA, 21 bp, Artificial sequence
  SiRNA target sequence
aaatgaagtattaccagaaag

SEQ ID NO: 302235 - DNA, 21 bp, Artificial sequence
  SiRNA target sequence
aatgaagtattaccagaaagt

SEQ ID NO: 302236 - DNA, 21 bp, Artificial sequence
  SiRNA target sequence
atgaagtattaccagaaagtc

SEQ ID NO: 302237 - DNA, 21 bp, Artificial sequence
  SiRNA target sequence
tgaagtattaccagaaagtcg

SEQ ID NO: 302238 - DNA, 21 bp, Artificial sequence
  SiRNA target sequence
gaagtattaccagaaagtcgc

SEQ ID NO: 302239 - DNA, 21 bp, Artificial sequence
  SiRNA target sequence
aagtattaccagaaagtcgca

SEQ ID NO: 302240 - DNA, 21 bp, Artificial sequence
  SiRNA target sequence
agtattaccagaaagtcgcaa

SEQ ID NO: 302241 - DNA, 21 bp, Artificial sequence
  SiRNA target sequence
gtattaccagaaagtcgcaag

SEQ ID NO: 302242 - DNA, 21 bp, Artificial sequence
  SiRNA target sequence
tattaccagaaagtcgcaagt

SEQ ID NO: 302243 - DNA, 21 bp, Artificial sequence
  SiRNA target sequence
attaccagaaagtcgcaagtg

SEQ ID NO: 302244 - DNA, 21 bp, Artificial sequence
  SiRNA target sequence
ttaccagaaagtcgcaagtgg

SEQ ID NO: 302245 - DNA, 21 bp, Artificial sequence
  SiRNA target sequence
taccagaaagtcgcaagtggc

SEQ ID NO: 302246 - DNA, 21 bp, Artificial sequence
  SiRNA target sequence
accagaaagtcgcaagtggcg

SEQ ID NO: 302247 - DNA, 21 bp, Artificial sequence
  SiRNA target sequence
ccagaaagtcgcaagtggcgt

SEQ ID NO: 302248 - DNA, 21 bp, Artificial sequence
  SiRNA target sequence
cagaaagtcgcaagtggcgta

SEQ ID NO: 302249 - DNA, 21 bp, Artificial sequence
  SiRNA target sequence
agaaagtcgcaagtggcgtat

SEQ ID NO: 302250 - DNA, 21 bp, Artificial sequence
  SiRNA target sequence
gaaagtcgcaagtggcgtatc

SEQ ID NO: 302251 - DNA, 21 bp, Artificial sequence
  SiRNA target sequence
aaagtcgcaagtggcgtatca

SEQ ID NO: 302252 - DNA, 21 bp, Artificial sequence
  SiRNA target sequence
aagtcgcaagtggcgtatcat

SEQ ID NO: 302253 - DNA, 21 bp, Artificial sequence
  SiRNA target sequence
agtcgcaagtggcgtatcata

SEQ ID NO: 302254 - DNA, 21 bp, Artificial sequence
  SiRNA target sequence
gtcgcaagtggcgtatcatat

SEQ ID NO: 302255 - DNA, 21 bp, Artificial sequence
  SiRNA target sequence
tcgcaagtggcgtatcatatt

SEQ ID NO: 302256 - DNA, 21 bp, Artificial sequence
  SiRNA target sequence
cgcaagtggcgtatcatattt

SEQ ID NO: 302257 - DNA, 21 bp, Artificial sequence
  SiRNA target sequence
gcaagtggcgtatcatatttg

SEQ ID NO: 302258 - DNA, 21 bp, Artificial sequence
  SiRNA target sequence
caagtggcgtatcatatttga

SEQ ID NO: 302259 - DNA, 21 bp, Artificial sequence
  SiRNA target sequence
aagtggcgtatcatatttgaa

SEQ ID NO: 302260 - DNA, 21 bp, Artificial sequence
  SiRNA target sequence
agtggcgtatcatatttgaag

SEQ ID NO: 302261 - DNA, 21 bp, Artificial sequence
  SiRNA target sequence
gtggcgtatcatatttgaaga

SEQ ID NO: 302262 - DNA, 21 bp, Artificial sequence
  SiRNA target sequence
tggcgtatcatatttgaagaa

SEQ ID NO: 302263 - DNA, 21 bp, Artificial sequence
  SiRNA target sequence
ggcgtatcatatttgaagaaa

SEQ ID NO: 302264 - DNA, 21 bp, Artificial sequence
  SiRNA target sequence
gcgtatcatatttgaagaaag

SEQ ID NO: 302265 - DNA, 21 bp, Artificial sequence
  SiRNA target sequence
cgtatcatatttgaagaaagt

SEQ ID NO: 302266 - DNA, 21 bp, Artificial sequence
  SiRNA target sequence
gtatcatatttgaagaaagtt

SEQ ID NO: 302267 - DNA, 21 bp, Artificial sequence
  SiRNA target sequence
tatcatatttgaagaaagttt

SEQ ID NO: 302268 - DNA, 21 bp, Artificial sequence
  SiRNA target sequence
atcatatttgaagaaagtttt

SEQ ID NO: 302269 - DNA, 21 bp, Artificial sequence
  SiRNA target sequence
tcatatttgaagaaagttttg

SEQ ID NO: 302270 - DNA, 21 bp, Artificial sequence
  SiRNA target sequence
catatttgaagaaagttttgg

SEQ ID NO: 302271 - DNA, 21 bp, Artificial sequence
  SiRNA target sequence
atatttgaagaaagttttgga

SEQ ID NO: 302272 - DNA, 21 bp, Artificial sequence
  SiRNA target sequence
tatttgaagaaagttttggat

SEQ ID NO: 302273 - DNA, 21 bp, Artificial sequence
  SiRNA target sequence
atttgaagaaagttttggatg

SEQ ID NO: 302274 - DNA, 21 bp, Artificial sequence
  SiRNA target sequence
tttgaagaaagttttggatgc

SEQ ID NO: 302275 - DNA, 21 bp, Artificial sequence
  SiRNA target sequence
ttgaagaaagttttggatgca

SEQ ID NO: 302276 - DNA, 21 bp, Artificial sequence
  SiRNA target sequence
tgaagaaagttttggatgcag

SEQ ID NO: 302277 - DNA, 21 bp, Artificial sequence
  SiRNA target sequence
gaagaaagttttggatgcagg

SEQ ID NO: 302278 - DNA, 21 bp, Artificial sequence
  SiRNA target sequence
aagaaagttttggatgcaggt

SEQ ID NO: 302279 - DNA, 21 bp, Artificial sequence
  SiRNA target sequence
agaaagttttggatgcaggtc

SEQ ID NO: 302280 - DNA, 21 bp, Artificial sequence
  SiRNA target sequence
gaaagttttggatgcaggtct

SEQ ID NO: 302281 - DNA, 21 bp, Artificial sequence
  SiRNA target sequence
aaagttttggatgcaggtctt

SEQ ID NO: 302282 - DNA, 21 bp, Artificial sequence
  SiRNA target sequence
aagttttggatgcaggtcttg

SEQ ID NO: 302283 - DNA, 21 bp, Artificial sequence
  SiRNA target sequence
agttttggatgcaggtcttgc

SEQ ID NO: 302284 - DNA, 21 bp, Artificial sequence
  SiRNA target sequence
gttttggatgcaggtcttgca

SEQ ID NO: 302285 - DNA, 21 bp, Artificial sequence
  SiRNA target sequence
ttttggatgcaggtcttgcaa

SEQ ID NO: 302286 - DNA, 21 bp, Artificial sequence
  SiRNA target sequence
tttggatgcaggtcttgcaat

SEQ ID NO: 302287 - DNA, 21 bp, Artificial sequence
  SiRNA target sequence
ttggatgcaggtcttgcaatt

SEQ ID NO: 302288 - DNA, 21 bp, Artificial sequence
  SiRNA target sequence
tggatgcaggtcttgcaattt

SEQ ID NO: 302289 - DNA, 21 bp, Artificial sequence
  SiRNA target sequence
ggatgcaggtcttgcaatttg

SEQ ID NO: 302290 - DNA, 21 bp, Artificial sequence
  SiRNA target sequence
gatgcaggtcttgcaatttgc

SEQ ID NO: 302291 - DNA, 21 bp, Artificial sequence
  SiRNA target sequence
atgcaggtcttgcaatttgca

SEQ ID NO: 302292 - DNA, 21 bp, Artificial sequence
  SiRNA target sequence
tgcaggtcttgcaatttgcaa

SEQ ID NO: 302293 - DNA, 21 bp, Artificial sequence
  SiRNA target sequence
gcaggtcttgcaatttgcaag

SEQ ID NO: 302294 - DNA, 21 bp, Artificial sequence
  SiRNA target sequence
caggtcttgcaatttgcaaga

SEQ ID NO: 302295 - DNA, 21 bp, Artificial sequence
  SiRNA target sequence
aggtcttgcaatttgcaagac

SEQ ID NO: 302296 - DNA, 21 bp, Artificial sequence
  SiRNA target sequence
ggtcttgcaatttgcaagact

SEQ ID NO: 302297 - DNA, 21 bp, Artificial sequence
  SiRNA target sequence
gtcttgcaatttgcaagactt

SEQ ID NO: 302298 - DNA, 21 bp, Artificial sequence
  SiRNA target sequence
tcttgcaatttgcaagacttg

SEQ ID NO: 302299 - DNA, 21 bp, Artificial sequence
  SiRNA target sequence
cttgcaatttgcaagacttgg

SEQ ID NO: 302300 - DNA, 21 bp, Artificial sequence
  SiRNA target sequence
ttgcaatttgcaagacttgga

SEQ ID NO: 302301 - DNA, 21 bp, Artificial sequence
  SiRNA target sequence
tgcaatttgcaagacttggat

SEQ ID NO: 302302 - DNA, 21 bp, Artificial sequence
  SiRNA target sequence
gcaatttgcaagacttggatt

SEQ ID NO: 302303 - DNA, 21 bp, Artificial sequence
  SiRNA target sequence
caatttgcaagacttggattg

SEQ ID NO: 302304 - DNA, 21 bp, Artificial sequence
  SiRNA target sequence
aatttgcaagacttggattga

SEQ ID NO: 302305 - DNA, 21 bp, Artificial sequence
  SiRNA target sequence
atttgcaagacttggattgaa

SEQ ID NO: 302306 - DNA, 21 bp, Artificial sequence
  SiRNA target sequence
tttgcaagacttggattgaag

SEQ ID NO: 302307 - DNA, 21 bp, Artificial sequence
  SiRNA target sequence
ttgcaagacttggattgaaga

SEQ ID NO: 302308 - DNA, 21 bp, Artificial sequence
  SiRNA target sequence
tgcaagacttggattgaagaa

SEQ ID NO: 302309 - DNA, 21 bp, Artificial sequence
  SiRNA target sequence
gcaagacttggattgaagaaa

SEQ ID NO: 302310 - DNA, 21 bp, Artificial sequence
  SiRNA target sequence
caagacttggattgaagaaac

SEQ ID NO: 302311 - DNA, 21 bp, Artificial sequence
  SiRNA target sequence
aagacttggattgaagaaact

SEQ ID NO: 302312 - DNA, 21 bp, Artificial sequence
  SiRNA target sequence
agacttggattgaagaaactg

SEQ ID NO: 302313 - DNA, 21 bp, Artificial sequence
  SiRNA target sequence
gacttggattgaagaaactgt

SEQ ID NO: 302314 - DNA, 21 bp, Artificial sequence
  SiRNA target sequence
acttggattgaagaaactgtc

SEQ ID NO: 302315 - DNA, 21 bp, Artificial sequence
  SiRNA target sequence
cttggattgaagaaactgtca

SEQ ID NO: 302316 - DNA, 21 bp, Artificial sequence
  SiRNA target sequence
ttggattgaagaaactgtcaa

SEQ ID NO: 302317 - DNA, 21 bp, Artificial sequence
  SiRNA target sequence
tggattgaagaaactgtcaaa

SEQ ID NO: 302318 - DNA, 21 bp, Artificial sequence
  SiRNA target sequence
ggattgaagaaactgtcaaat

SEQ ID NO: 302319 - DNA, 21 bp, Artificial sequence
  SiRNA target sequence
gattgaagaaactgtcaaata

SEQ ID NO: 302320 - DNA, 21 bp, Artificial sequence
  SiRNA target sequence
attgaagaaactgtcaaatat

SEQ ID NO: 302321 - DNA, 21 bp, Artificial sequence
  SiRNA target sequence
ttgaagaaactgtcaaatatg

SEQ ID NO: 302322 - DNA, 21 bp, Artificial sequence
  SiRNA target sequence
tgaagaaactgtcaaatatgt

SEQ ID NO: 302323 - DNA, 21 bp, Artificial sequence
  SiRNA target sequence
gaagaaactgtcaaatatgtg

SEQ ID NO: 302324 - DNA, 21 bp, Artificial sequence
  SiRNA target sequence
aagaaactgtcaaatatgtgc

SEQ ID NO: 302325 - DNA, 21 bp, Artificial sequence
  SiRNA target sequence
agaaactgtcaaatatgtgca

SEQ ID NO: 302326 - DNA, 21 bp, Artificial sequence
  SiRNA target sequence
gaaactgtcaaatatgtgcag

SEQ ID NO: 302327 - DNA, 21 bp, Artificial sequence
  SiRNA target sequence
aaactgtcaaatatgtgcagg

SEQ ID NO: 302328 - DNA, 21 bp, Artificial sequence
  SiRNA target sequence
aactgtcaaatatgtgcagga

SEQ ID NO: 302329 - DNA, 21 bp, Artificial sequence
  SiRNA target sequence
actgtcaaatatgtgcaggaa

SEQ ID NO: 302330 - DNA, 21 bp, Artificial sequence
  SiRNA target sequence
ctgtcaaatatgtgcaggaac

SEQ ID NO: 302331 - DNA, 21 bp, Artificial sequence
  SiRNA target sequence
tgtcaaatatgtgcaggaaca

SEQ ID NO: 302332 - DNA, 21 bp, Artificial sequence
  SiRNA target sequence
gtcaaatatgtgcaggaacac

SEQ ID NO: 302333 - DNA, 21 bp, Artificial sequence
  SiRNA target sequence
tcaaatatgtgcaggaacacc

SEQ ID NO: 302334 - DNA, 21 bp, Artificial sequence
  SiRNA target sequence
caaatatgtgcaggaacaccc

SEQ ID NO: 302335 - DNA, 21 bp, Artificial sequence
  SiRNA target sequence
aaatatgtgcaggaacaccct

SEQ ID NO: 302336 - DNA, 21 bp, Artificial sequence
  SiRNA target sequence
aatatgtgcaggaacaccctt

SEQ ID NO: 302337 - DNA, 21 bp, Artificial sequence
  SiRNA target sequence
atatgtgcaggaacacccttg

SEQ ID NO: 302338 - DNA, 21 bp, Artificial sequence
  SiRNA target sequence
tatgtgcaggaacacccttgg

SEQ ID NO: 302339 - DNA, 21 bp, Artificial sequence
  SiRNA target sequence
atgtgcaggaacacccttgga

SEQ ID NO: 302340 - DNA, 21 bp, Artificial sequence
  SiRNA target sequence
tgtgcaggaacacccttggac

SEQ ID NO: 302341 - DNA, 21 bp, Artificial sequence
  SiRNA target sequence
gtgcaggaacacccttggacc

SEQ ID NO: 302342 - DNA, 21 bp, Artificial sequence
  SiRNA target sequence
tgcaggaacacccttggacca

SEQ ID NO: 302343 - DNA, 21 bp, Artificial sequence
  SiRNA target sequence
gcaggaacacccttggaccac

SEQ ID NO: 302344 - DNA, 21 bp, Artificial sequence
  SiRNA target sequence
caggaacacccttggaccaca

SEQ ID NO: 302345 - DNA, 21 bp, Artificial sequence
  SiRNA target sequence
aggaacacccttggaccacag

SEQ ID NO: 302346 - DNA, 21 bp, Artificial sequence
  SiRNA target sequence
ggaacacccttggaccacagc

SEQ ID NO: 302347 - DNA, 21 bp, Artificial sequence
  SiRNA target sequence
gaacacccttggaccacagca

SEQ ID NO: 302348 - DNA, 21 bp, Artificial sequence
  SiRNA target sequence
aacacccttggaccacagcaa

SEQ ID NO: 302349 - DNA, 21 bp, Artificial sequence
  SiRNA target sequence
acacccttggaccacagcaat

SEQ ID NO: 302350 - DNA, 21 bp, Artificial sequence
  SiRNA target sequence
cacccttggaccacagcaatg

SEQ ID NO: 302351 - DNA, 21 bp, Artificial sequence
  SiRNA target sequence
acccttggaccacagcaatgg

SEQ ID NO: 302352 - DNA, 21 bp, Artificial sequence
  SiRNA target sequence
cccttggaccacagcaatggc

SEQ ID NO: 302353 - DNA, 21 bp, Artificial sequence
  SiRNA target sequence
ccttggaccacagcaatggcc

SEQ ID NO: 302354 - DNA, 21 bp, Artificial sequence
  SiRNA target sequence
cttggaccacagcaatggcca

SEQ ID NO: 302355 - DNA, 21 bp, Artificial sequence
  SiRNA target sequence
ttggaccacagcaatggccat

SEQ ID NO: 302356 - DNA, 21 bp, Artificial sequence
  SiRNA target sequence
tggaccacagcaatggccatt

SEQ ID NO: 302357 - DNA, 21 bp, Artificial sequence
  SiRNA target sequence
ggaccacagcaatggccattt

SEQ ID NO: 302358 - DNA, 21 bp, Artificial sequence
  SiRNA target sequence
gaccacagcaatggccatttt

SEQ ID NO: 302359 - DNA, 21 bp, Artificial sequence
  SiRNA target sequence
accacagcaatggccatttta

SEQ ID NO: 302360 - DNA, 21 bp, Artificial sequence
  SiRNA target sequence
ccacagcaatggccattttag

SEQ ID NO: 302361 - DNA, 21 bp, Artificial sequence
  SiRNA target sequence
cacagcaatggccattttagg

SEQ ID NO: 302362 - DNA, 21 bp, Artificial sequence
  SiRNA target sequence
acagcaatggccattttagga

SEQ ID NO: 302363 - DNA, 21 bp, Artificial sequence
  SiRNA target sequence
cagcaatggccattttaggaa

SEQ ID NO: 302364 - DNA, 21 bp, Artificial sequence
  SiRNA target sequence
agcaatggccattttaggaac

SEQ ID NO: 302365 - DNA, 21 bp, Artificial sequence
  SiRNA target sequence
gcaatggccattttaggaacc

SEQ ID NO: 302366 - DNA, 21 bp, Artificial sequence
  SiRNA target sequence
caatggccattttaggaaccc

SEQ ID NO: 302367 - DNA, 21 bp, Artificial sequence
  SiRNA target sequence
aatggccattttaggaaccct

SEQ ID NO: 302368 - DNA, 21 bp, Artificial sequence
  SiRNA target sequence
atggccattttaggaacccta

SEQ ID NO: 302369 - DNA, 21 bp, Artificial sequence
  SiRNA target sequence
tggccattttaggaaccctat

SEQ ID NO: 302370 - DNA, 21 bp, Artificial sequence
  SiRNA target sequence
ggccattttaggaaccctatt

SEQ ID NO: 302371 - DNA, 21 bp, Artificial sequence
  SiRNA target sequence
gccattttaggaaccctatta

SEQ ID NO: 302372 - DNA, 21 bp, Artificial sequence
  SiRNA target sequence
ccattttaggaaccctattag

SEQ ID NO: 302373 - DNA, 21 bp, Artificial sequence
  SiRNA target sequence
cattttaggaaccctattagg

SEQ ID NO: 302374 - DNA, 21 bp, Artificial sequence
  SiRNA target sequence
attttaggaaccctattaggt

SEQ ID NO: 302375 - DNA, 21 bp, Artificial sequence
  SiRNA target sequence
ttttaggaaccctattaggta

SEQ ID NO: 302376 - DNA, 21 bp, Artificial sequence
  SiRNA target sequence
tttaggaaccctattaggtat

SEQ ID NO: 302377 - DNA, 21 bp, Artificial sequence
  SiRNA target sequence
ttaggaaccctattaggtatt

SEQ ID NO: 302378 - DNA, 21 bp, Artificial sequence
  SiRNA target sequence
taggaaccctattaggtattc

SEQ ID NO: 302379 - DNA, 21 bp, Artificial sequence
  SiRNA target sequence
aggaaccctattaggtattct

SEQ ID NO: 302380 - DNA, 21 bp, Artificial sequence
  SiRNA target sequence
ggaaccctattaggtattctt

SEQ ID NO: 302381 - DNA, 21 bp, Artificial sequence
  SiRNA target sequence
gaaccctattaggtattctta

SEQ ID NO: 302382 - DNA, 21 bp, Artificial sequence
  SiRNA target sequence
aaccctattaggtattcttac

SEQ ID NO: 302383 - DNA, 21 bp, Artificial sequence
  SiRNA target sequence
accctattaggtattcttacc

SEQ ID NO: 302384 - DNA, 21 bp, Artificial sequence
  SiRNA target sequence
ccctattaggtattcttaccg

SEQ ID NO: 302385 - DNA, 21 bp, Artificial sequence
  SiRNA target sequence
cctattaggtattcttaccgt

SEQ ID NO: 302386 - DNA, 21 bp, Artificial sequence
  SiRNA target sequence
ctattaggtattcttaccgta

SEQ ID NO: 302387 - DNA, 21 bp, Artificial sequence
  SiRNA target sequence
tattaggtattcttaccgtag

SEQ ID NO: 302388 - DNA, 21 bp, Artificial sequence
  SiRNA target sequence
attaggtattcttaccgtagt

SEQ ID NO: 302389 - DNA, 21 bp, Artificial sequence
  SiRNA target sequence
ttaggtattcttaccgtagta

SEQ ID NO: 302390 - DNA, 21 bp, Artificial sequence
  SiRNA target sequence
taggtattcttaccgtagtag

SEQ ID NO: 302391 - DNA, 21 bp, Artificial sequence
  SiRNA target sequence
aggtattcttaccgtagtagg

SEQ ID NO: 302392 - DNA, 21 bp, Artificial sequence
  SiRNA target sequence
ggtattcttaccgtagtagga

SEQ ID NO: 302393 - DNA, 21 bp, Artificial sequence
  SiRNA target sequence
gtattcttaccgtagtaggat

SEQ ID NO: 302394 - DNA, 21 bp, Artificial sequence
  SiRNA target sequence
tattcttaccgtagtaggatt

SEQ ID NO: 302395 - DNA, 21 bp, Artificial sequence
  SiRNA target sequence
attcttaccgtagtaggattt

SEQ ID NO: 302396 - DNA, 21 bp, Artificial sequence
  SiRNA target sequence
ttcttaccgtagtaggatttt

SEQ ID NO: 302397 - DNA, 21 bp, Artificial sequence
  SiRNA target sequence
tcttaccgtagtaggattttg

SEQ ID NO: 302398 - DNA, 21 bp, Artificial sequence
  SiRNA target sequence
cttaccgtagtaggattttgg

SEQ ID NO: 302399 - DNA, 21 bp, Artificial sequence
  SiRNA target sequence
ttaccgtagtaggattttgga

SEQ ID NO: 302400 - DNA, 21 bp, Artificial sequence
  SiRNA target sequence
taccgtagtaggattttggaa

SEQ ID NO: 302401 - DNA, 21 bp, Artificial sequence
  SiRNA target sequence
accgtagtaggattttggaaa

SEQ ID NO: 302402 - DNA, 21 bp, Artificial sequence
  SiRNA target sequence
ccgtagtaggattttggaaat

SEQ ID NO: 302403 - DNA, 21 bp, Artificial sequence
  SiRNA target sequence
cgtagtaggattttggaaatg

SEQ ID NO: 302404 - DNA, 21 bp, Artificial sequence
  SiRNA target sequence
gtagtaggattttggaaatgg

SEQ ID NO: 302405 - DNA, 21 bp, Artificial sequence
  SiRNA target sequence
tagtaggattttggaaatggc

SEQ ID NO: 302406 - DNA, 21 bp, Artificial sequence
  SiRNA target sequence
agtaggattttggaaatggct

SEQ ID NO: 302407 - DNA, 21 bp, Artificial sequence
  SiRNA target sequence
gtaggattttggaaatggctt

SEQ ID NO: 302408 - DNA, 21 bp, Artificial sequence
  SiRNA target sequence
taggattttggaaatggcttt

SEQ ID NO: 302409 - DNA, 21 bp, Artificial sequence
  SiRNA target sequence
aggattttggaaatggctttg

SEQ ID NO: 302410 - DNA, 21 bp, Artificial sequence
  SiRNA target sequence
ggattttggaaatggctttgc

SEQ ID NO: 302411 - DNA, 21 bp, Artificial sequence
  SiRNA target sequence
gattttggaaatggctttgca

SEQ ID NO: 302412 - DNA, 21 bp, Artificial sequence
  SiRNA target sequence
attttggaaatggctttgcag

SEQ ID NO: 302413 - DNA, 21 bp, Artificial sequence
  SiRNA target sequence
ttttggaaatggctttgcagt

SEQ ID NO: 302414 - DNA, 21 bp, Artificial sequence
  SiRNA target sequence
tttggaaatggctttgcagtg

SEQ ID NO: 302415 - DNA, 21 bp, Artificial sequence
  SiRNA target sequence
ttggaaatggctttgcagtgg

SEQ ID NO: 302416 - DNA, 21 bp, Artificial sequence
  SiRNA target sequence
tggaaatggctttgcagtgga

SEQ ID NO: 302417 - DNA, 21 bp, Artificial sequence
  SiRNA target sequence
ggaaatggctttgcagtggag

SEQ ID NO: 302418 - DNA, 21 bp, Artificial sequence
  SiRNA target sequence
gaaatggctttgcagtggaga

SEQ ID NO: 302419 - DNA, 21 bp, Artificial sequence
  SiRNA target sequence
aaatggctttgcagtggagaa

SEQ ID NO: 302420 - DNA, 21 bp, Artificial sequence
  SiRNA target sequence
aatggctttgcagtggagaaa

SEQ ID NO: 302421 - DNA, 21 bp, Artificial sequence
  SiRNA target sequence
atggctttgcagtggagaaaa

SEQ ID NO: 302422 - DNA, 21 bp, Artificial sequence
  SiRNA target sequence
tggctttgcagtggagaaaag

SEQ ID NO: 302423 - DNA, 21 bp, Artificial sequence
  SiRNA target sequence
ggctttgcagtggagaaaaga

SEQ ID NO: 302424 - DNA, 21 bp, Artificial sequence
  SiRNA target sequence
gctttgcagtggagaaaagaa

SEQ ID NO: 302425 - DNA, 21 bp, Artificial sequence
  SiRNA target sequence
ctttgcagtggagaaaagaag

SEQ ID NO: 302426 - DNA, 21 bp, Artificial sequence
  SiRNA target sequence
tttgcagtggagaaaagaaga

SEQ ID NO: 302427 - DNA, 21 bp, Artificial sequence
  SiRNA target sequence
ttgcagtggagaaaagaagaa

SEQ ID NO: 302428 - DNA, 21 bp, Artificial sequence
  SiRNA target sequence
tgcagtggagaaaagaagaaa

SEQ ID NO: 302429 - DNA, 21 bp, Artificial sequence
  SiRNA target sequence
gcagtggagaaaagaagaaac

SEQ ID NO: 302430 - DNA, 21 bp, Artificial sequence
  SiRNA target sequence
cagtggagaaaagaagaaacc

SEQ ID NO: 302431 - DNA, 21 bp, Artificial sequence
  SiRNA target sequence
agtggagaaaagaagaaacca

SEQ ID NO: 302432 - DNA, 21 bp, Artificial sequence
  SiRNA target sequence
gtggagaaaagaagaaaccac

SEQ ID NO: 302433 - DNA, 21 bp, Artificial sequence
  SiRNA target sequence
tggagaaaagaagaaaccaca

SEQ ID NO: 302434 - DNA, 21 bp, Artificial sequence
  SiRNA target sequence
ggagaaaagaagaaaccacaa

SEQ ID NO: 302435 - DNA, 21 bp, Artificial sequence
  SiRNA target sequence
gagaaaagaagaaaccacaag

SEQ ID NO: 302436 - DNA, 21 bp, Artificial sequence
  SiRNA target sequence
agaaaagaagaaaccacaagc

SEQ ID NO: 302437 - DNA, 21 bp, Artificial sequence
  SiRNA target sequence
gaaaagaagaaaccacaagct

SEQ ID NO: 302438 - DNA, 21 bp, Artificial sequence
  SiRNA target sequence
aaaagaagaaaccacaagcta

SEQ ID NO: 302439 - DNA, 21 bp, Artificial sequence
  SiRNA target sequence
aaagaagaaaccacaagctac

SEQ ID NO: 302440 - DNA, 21 bp, Artificial sequence
  SiRNA target sequence
aagaagaaaccacaagctaca

SEQ ID NO: 302441 - DNA, 21 bp, Artificial sequence
  SiRNA target sequence
agaagaaaccacaagctacaa

SEQ ID NO: 302442 - DNA, 21 bp, Artificial sequence
  SiRNA target sequence
gaagaaaccacaagctacaaa

SEQ ID NO: 302443 - DNA, 21 bp, Artificial sequence
  SiRNA target sequence
aagaaaccacaagctacaaaa

SEQ ID NO: 302444 - DNA, 21 bp, Artificial sequence
  SiRNA target sequence
agaaaccacaagctacaaaac

SEQ ID NO: 302445 - DNA, 21 bp, Artificial sequence
  SiRNA target sequence
gaaaccacaagctacaaaacg

SEQ ID NO: 302446 - DNA, 21 bp, Artificial sequence
  SiRNA target sequence
aaaccacaagctacaaaacga

SEQ ID NO: 302447 - DNA, 21 bp, Artificial sequence
  SiRNA target sequence
aaccacaagctacaaaacgac

SEQ ID NO: 302448 - DNA, 21 bp, Artificial sequence
  SiRNA target sequence
accacaagctacaaaacgaca

SEQ ID NO: 302449 - DNA, 21 bp, Artificial sequence
  SiRNA target sequence
ccacaagctacaaaacgacat

SEQ ID NO: 302450 - DNA, 21 bp, Artificial sequence
  SiRNA target sequence
cacaagctacaaaacgacatt

SEQ ID NO: 302451 - DNA, 21 bp, Artificial sequence
  SiRNA target sequence
acaagctacaaaacgacattt

SEQ ID NO: 302452 - DNA, 21 bp, Artificial sequence
  SiRNA target sequence
caagctacaaaacgacatttt

SEQ ID NO: 302453 - DNA, 21 bp, Artificial sequence
  SiRNA target sequence
aagctacaaaacgacattttg

SEQ ID NO: 302454 - DNA, 21 bp, Artificial sequence
  SiRNA target sequence
agctacaaaacgacattttgt

SEQ ID NO: 302455 - DNA, 21 bp, Artificial sequence
  SiRNA target sequence
gctacaaaacgacattttgtc

SEQ ID NO: 302456 - DNA, 21 bp, Artificial sequence
  SiRNA target sequence
ctacaaaacgacattttgtca

SEQ ID NO: 302457 - DNA, 21 bp, Artificial sequence
  SiRNA target sequence
tacaaaacgacattttgtcaa

SEQ ID NO: 302458 - DNA, 21 bp, Artificial sequence
  SiRNA target sequence
acaaaacgacattttgtcaat

SEQ ID NO: 302459 - DNA, 21 bp, Artificial sequence
  SiRNA target sequence
caaaacgacattttgtcaata

SEQ ID NO: 302460 - DNA, 21 bp, Artificial sequence
  SiRNA target sequence
aaaacgacattttgtcaatac

SEQ ID NO: 302461 - DNA, 21 bp, Artificial sequence
  SiRNA target sequence
aaacgacattttgtcaatact

SEQ ID NO: 302462 - DNA, 21 bp, Artificial sequence
  SiRNA target sequence
aacgacattttgtcaatactg

SEQ ID NO: 302463 - DNA, 21 bp, Artificial sequence
  SiRNA target sequence
acgacattttgtcaatactgg

SEQ ID NO: 302464 - DNA, 21 bp, Artificial sequence
  SiRNA target sequence
cgacattttgtcaatactggt

SEQ ID NO: 302465 - DNA, 21 bp, Artificial sequence
  SiRNA target sequence
gacattttgtcaatactggtg

SEQ ID NO: 302466 - DNA, 21 bp, Artificial sequence
  SiRNA target sequence
acattttgtcaatactggtgt

SEQ ID NO: 302467 - DNA, 21 bp, Artificial sequence
  SiRNA target sequence
cattttgtcaatactggtgtg

SEQ ID NO: 302468 - DNA, 21 bp, Artificial sequence
  SiRNA target sequence
attttgtcaatactggtgtga

SEQ ID NO: 302469 - DNA, 21 bp, Artificial sequence
  SiRNA target sequence
ttttgtcaatactggtgtgac

SEQ ID NO: 302470 - DNA, 21 bp, Artificial sequence
  SiRNA target sequence
tttgtcaatactggtgtgact

SEQ ID NO: 302471 - DNA, 21 bp, Artificial sequence
  SiRNA target sequence
ttgtcaatactggtgtgactc

SEQ ID NO: 302472 - DNA, 21 bp, Artificial sequence
  SiRNA target sequence
tgtcaatactggtgtgactct

SEQ ID NO: 302473 - DNA, 21 bp, Artificial sequence
  SiRNA target sequence
gtcaatactggtgtgactctt

SEQ ID NO: 302474 - DNA, 21 bp, Artificial sequence
  SiRNA target sequence
tcaatactggtgtgactcttg

SEQ ID NO: 302475 - DNA, 21 bp, Artificial sequence
  SiRNA target sequence
caatactggtgtgactcttgt

SEQ ID NO: 302476 - DNA, 21 bp, Artificial sequence
  SiRNA target sequence
aatactggtgtgactcttgtc

SEQ ID NO: 302477 - DNA, 21 bp, Artificial sequence
  SiRNA target sequence
atactggtgtgactcttgtca

SEQ ID NO: 302478 - DNA, 21 bp, Artificial sequence
  SiRNA target sequence
tactggtgtgactcttgtcat

SEQ ID NO: 302479 - DNA, 21 bp, Artificial sequence
  SiRNA target sequence
actggtgtgactcttgtcata

SEQ ID NO: 302480 - DNA, 21 bp, Artificial sequence
  SiRNA target sequence
ctggtgtgactcttgtcatac

SEQ ID NO: 302481 - DNA, 21 bp, Artificial sequence
  SiRNA target sequence
tggtgtgactcttgtcatacc

SEQ ID NO: 302482 - DNA, 21 bp, Artificial sequence
  SiRNA target sequence
ggtgtgactcttgtcatacca

SEQ ID NO: 302483 - DNA, 21 bp, Artificial sequence
  SiRNA target sequence
gtgtgactcttgtcataccac

SEQ ID NO: 302484 - DNA, 21 bp, Artificial sequence
  SiRNA target sequence
tgtgactcttgtcataccaca

SEQ ID NO: 302485 - DNA, 21 bp, Artificial sequence
  SiRNA target sequence
gtgactcttgtcataccacat

SEQ ID NO: 302486 - DNA, 21 bp, Artificial sequence
  SiRNA target sequence
tgactcttgtcataccacatc

SEQ ID NO: 302487 - DNA, 21 bp, Artificial sequence
  SiRNA target sequence
gactcttgtcataccacatcg

SEQ ID NO: 302488 - DNA, 21 bp, Artificial sequence
  SiRNA target sequence
actcttgtcataccacatcga

SEQ ID NO: 302489 - DNA, 21 bp, Artificial sequence
  SiRNA target sequence
ctcttgtcataccacatcgag

SEQ ID NO: 302490 - DNA, 21 bp, Artificial sequence
  SiRNA target sequence
tcttgtcataccacatcgaga

SEQ ID NO: 302491 - DNA, 21 bp, Artificial sequence
  SiRNA target sequence
cttgtcataccacatcgagac

SEQ ID NO: 302492 - DNA, 21 bp, Artificial sequence
  SiRNA target sequence
ttgtcataccacatcgagacc

SEQ ID NO: 302493 - DNA, 21 bp, Artificial sequence
  SiRNA target sequence
tgtcataccacatcgagacct

SEQ ID NO: 302494 - DNA, 21 bp, Artificial sequence
  SiRNA target sequence
gtcataccacatcgagacctc

SEQ ID NO: 302495 - DNA, 21 bp, Artificial sequence
  SiRNA target sequence
tcataccacatcgagacctca

SEQ ID NO: 302496 - DNA, 21 bp, Artificial sequence
  SiRNA target sequence
cataccacatcgagacctcaa

SEQ ID NO: 302497 - DNA, 21 bp, Artificial sequence
  SiRNA target sequence
ataccacatcgagacctcaat

SEQ ID NO: 302498 - DNA, 21 bp, Artificial sequence
  SiRNA target sequence
taccacatcgagacctcaata

SEQ ID NO: 302499 - DNA, 21 bp, Artificial sequence
  SiRNA target sequence
accacatcgagacctcaataa

SEQ ID NO: 302500 - DNA, 21 bp, Artificial sequence
  SiRNA target sequence
ccacatcgagacctcaataag

SEQ ID NO: 302501 - DNA, 21 bp, Artificial sequence
  SiRNA target sequence
cacatcgagacctcaataagt

SEQ ID NO: 302502 - DNA, 21 bp, Artificial sequence
  SiRNA target sequence
acatcgagacctcaataagtt

SEQ ID NO: 302503 - DNA, 21 bp, Artificial sequence
  SiRNA target sequence
catcgagacctcaataagttt

SEQ ID NO: 302504 - DNA, 21 bp, Artificial sequence
  SiRNA target sequence
atcgagacctcaataagtttt

SEQ ID NO: 302505 - DNA, 21 bp, Artificial sequence
  SiRNA target sequence
tcgagacctcaataagttttg

SEQ ID NO: 302506 - DNA, 21 bp, Artificial sequence
  SiRNA target sequence
cgagacctcaataagttttgg

SEQ ID NO: 302507 - DNA, 21 bp, Artificial sequence
  SiRNA target sequence
gagacctcaataagttttggc

SEQ ID NO: 302508 - DNA, 21 bp, Artificial sequence
  SiRNA target sequence
agacctcaataagttttggca

SEQ ID NO: 302509 - DNA, 21 bp, Artificial sequence
  SiRNA target sequence
gacctcaataagttttggcag

SEQ ID NO: 302510 - DNA, 21 bp, Artificial sequence
  SiRNA target sequence
acctcaataagttttggcagt

SEQ ID NO: 302511 - DNA, 21 bp, Artificial sequence
  SiRNA target sequence
cctcaataagttttggcagtt

SEQ ID NO: 302512 - DNA, 21 bp, Artificial sequence
  SiRNA target sequence
ctcaataagttttggcagttg

SEQ ID NO: 302513 - DNA, 21 bp, Artificial sequence
  SiRNA target sequence
tcaataagttttggcagttgg

SEQ ID NO: 302514 - DNA, 21 bp, Artificial sequence
  SiRNA target sequence
caataagttttggcagttgga

SEQ ID NO: 302515 - DNA, 21 bp, Artificial sequence
  SiRNA target sequence
aataagttttggcagttggat

SEQ ID NO: 302516 - DNA, 21 bp, Artificial sequence
  SiRNA target sequence
ataagttttggcagttggatg

SEQ ID NO: 302517 - DNA, 21 bp, Artificial sequence
  SiRNA target sequence
taagttttggcagttggatga

SEQ ID NO: 302518 - DNA, 21 bp, Artificial sequence
  SiRNA target sequence
aagttttggcagttggatgaa

SEQ ID NO: 302519 - DNA, 21 bp, Artificial sequence
  SiRNA target sequence
agttttggcagttggatgaaa

SEQ ID NO: 302520 - DNA, 21 bp, Artificial sequence
  SiRNA target sequence
gttttggcagttggatgaaac

SEQ ID NO: 302521 - DNA, 21 bp, Artificial sequence
  SiRNA target sequence
ttttggcagttggatgaaaca

SEQ ID NO: 302522 - DNA, 21 bp, Artificial sequence
  SiRNA target sequence
tttggcagttggatgaaacat

SEQ ID NO: 302523 - DNA, 21 bp, Artificial sequence
  SiRNA target sequence
ttggcagttggatgaaacatt

SEQ ID NO: 302524 - DNA, 21 bp, Artificial sequence
  SiRNA target sequence
tggcagttggatgaaacatta

SEQ ID NO: 302525 - DNA, 21 bp, Artificial sequence
  SiRNA target sequence
ggcagttggatgaaacattag

SEQ ID NO: 302526 - DNA, 21 bp, Artificial sequence
  SiRNA target sequence
gcagttggatgaaacattaga

SEQ ID NO: 302527 - DNA, 21 bp, Artificial sequence
  SiRNA target sequence
cagttggatgaaacattagac

SEQ ID NO: 302528 - DNA, 21 bp, Artificial sequence
  SiRNA target sequence
agttggatgaaacattagacg

SEQ ID NO: 302529 - DNA, 21 bp, Artificial sequence
  SiRNA target sequence
gttggatgaaacattagacgt

SEQ ID NO: 302530 - DNA, 21 bp, Artificial sequence
  SiRNA target sequence
ttggatgaaacattagacgta

SEQ ID NO: 302531 - DNA, 21 bp, Artificial sequence
  SiRNA target sequence
tggatgaaacattagacgtat

SEQ ID NO: 302532 - DNA, 21 bp, Artificial sequence
  SiRNA target sequence
ggatgaaacattagacgtatc

SEQ ID NO: 302533 - DNA, 21 bp, Artificial sequence
  SiRNA target sequence
gatgaaacattagacgtatcc

SEQ ID NO: 302534 - DNA, 21 bp, Artificial sequence
  SiRNA target sequence
atgaaacattagacgtatcca

SEQ ID NO: 302535 - DNA, 21 bp, Artificial sequence
  SiRNA target sequence
tgaaacattagacgtatccaa

SEQ ID NO: 302536 - DNA, 21 bp, Artificial sequence
  SiRNA target sequence
gaaacattagacgtatccaac

SEQ ID NO: 302537 - DNA, 21 bp, Artificial sequence
  SiRNA target sequence
aaacattagacgtatccaaca

SEQ ID NO: 302538 - DNA, 21 bp, Artificial sequence
  SiRNA target sequence
aacattagacgtatccaacat

SEQ ID NO: 302539 - DNA, 21 bp, Artificial sequence
  SiRNA target sequence
acattagacgtatccaacatg

SEQ ID NO: 302540 - DNA, 21 bp, Artificial sequence
  SiRNA target sequence
cattagacgtatccaacatgc

SEQ ID NO: 302541 - DNA, 21 bp, Artificial sequence
  SiRNA target sequence
attagacgtatccaacatgcg

SEQ ID NO: 302542 - DNA, 21 bp, Artificial sequence
  SiRNA target sequence
ttagacgtatccaacatgcgt

SEQ ID NO: 302543 - DNA, 21 bp, Artificial sequence
  SiRNA target sequence
tagacgtatccaacatgcgtg

SEQ ID NO: 302544 - DNA, 21 bp, Artificial sequence
  SiRNA target sequence
agacgtatccaacatgcgtgt

SEQ ID NO: 302545 - DNA, 21 bp, Artificial sequence
  SiRNA target sequence
gacgtatccaacatgcgtgtt

SEQ ID NO: 302546 - DNA, 21 bp, Artificial sequence
  SiRNA target sequence
acgtatccaacatgcgtgttg

SEQ ID NO: 302547 - DNA, 21 bp, Artificial sequence
  SiRNA target sequence
cgtatccaacatgcgtgttgg

SEQ ID NO: 302548 - DNA, 21 bp, Artificial sequence
  SiRNA target sequence
gtatccaacatgcgtgttgga

SEQ ID NO: 302549 - DNA, 21 bp, Artificial sequence
  SiRNA target sequence
tatccaacatgcgtgttggag

SEQ ID NO: 302550 - DNA, 21 bp, Artificial sequence
  SiRNA target sequence
atccaacatgcgtgttggaga

SEQ ID NO: 302551 - DNA, 21 bp, Artificial sequence
  SiRNA target sequence
tccaacatgcgtgttggagat

SEQ ID NO: 302552 - DNA, 21 bp, Artificial sequence
  SiRNA target sequence
ccaacatgcgtgttggagatg

SEQ ID NO: 302553 - DNA, 21 bp, Artificial sequence
  SiRNA target sequence
caacatgcgtgttggagatgt

SEQ ID NO: 302554 - DNA, 21 bp, Artificial sequence
  SiRNA target sequence
aacatgcgtgttggagatgtt

SEQ ID NO: 302555 - DNA, 21 bp, Artificial sequence
  SiRNA target sequence
acatgcgtgttggagatgttg

SEQ ID NO: 302556 - DNA, 21 bp, Artificial sequence
  SiRNA target sequence
catgcgtgttggagatgttga

SEQ ID NO: 302557 - DNA, 21 bp, Artificial sequence
  SiRNA target sequence
atgcgtgttggagatgttgaa

SEQ ID NO: 302558 - DNA, 21 bp, Artificial sequence
  SiRNA target sequence
tgcgtgttggagatgttgaag

SEQ ID NO: 302559 - DNA, 21 bp, Artificial sequence
  SiRNA target sequence
gcgtgttggagatgttgaaga

SEQ ID NO: 302560 - DNA, 21 bp, Artificial sequence
  SiRNA target sequence
cgtgttggagatgttgaagat

SEQ ID NO: 302561 - DNA, 21 bp, Artificial sequence
  SiRNA target sequence
gtgttggagatgttgaagatc

SEQ ID NO: 302562 - DNA, 21 bp, Artificial sequence
  SiRNA target sequence
tgttggagatgttgaagatca

SEQ ID NO: 302563 - DNA, 21 bp, Artificial sequence
  SiRNA target sequence
gttggagatgttgaagatcat

SEQ ID NO: 302564 - DNA, 21 bp, Artificial sequence
  SiRNA target sequence
ttggagatgttgaagatcatc

SEQ ID NO: 302565 - DNA, 21 bp, Artificial sequence
  SiRNA target sequence
tggagatgttgaagatcatct

SEQ ID NO: 302566 - DNA, 21 bp, Artificial sequence
  SiRNA target sequence
ggagatgttgaagatcatctg

SEQ ID NO: 302567 - DNA, 21 bp, Artificial sequence
  SiRNA target sequence
gagatgttgaagatcatctgg

SEQ ID NO: 302568 - DNA, 21 bp, Artificial sequence
  SiRNA target sequence
agatgttgaagatcatctggc

SEQ ID NO: 302569 - DNA, 21 bp, Artificial sequence
  SiRNA target sequence
gatgttgaagatcatctggcg

SEQ ID NO: 302570 - DNA, 21 bp, Artificial sequence
  SiRNA target sequence
atgttgaagatcatctggcgg

SEQ ID NO: 302571 - DNA, 21 bp, Artificial sequence
  SiRNA target sequence
tgttgaagatcatctggcggc

SEQ ID NO: 302572 - DNA, 21 bp, Artificial sequence
  SiRNA target sequence
gttgaagatcatctggcggcc

SEQ ID NO: 302573 - DNA, 21 bp, Artificial sequence
  SiRNA target sequence
ttgaagatcatctggcggcct

SEQ ID NO: 302574 - DNA, 21 bp, Artificial sequence
  SiRNA target sequence
tgaagatcatctggcggcctt

SEQ ID NO: 302575 - DNA, 21 bp, Artificial sequence
  SiRNA target sequence
gaagatcatctggcggcctta

SEQ ID NO: 302576 - DNA, 21 bp, Artificial sequence
  SiRNA target sequence
aagatcatctggcggccttac

SEQ ID NO: 302577 - DNA, 21 bp, Artificial sequence
  SiRNA target sequence
agatcatctggcggccttact

SEQ ID NO: 302578 - DNA, 21 bp, Artificial sequence
  SiRNA target sequence
gatcatctggcggccttactt

SEQ ID NO: 302579 - DNA, 21 bp, Artificial sequence
  SiRNA target sequence
atcatctggcggccttactta

SEQ ID NO: 302580 - DNA, 21 bp, Artificial sequence
  SiRNA target sequence
tcatctggcggccttacttaa

SEQ ID NO: 302581 - DNA, 21 bp, Artificial sequence
  SiRNA target sequence
catctggcggccttacttaaa

SEQ ID NO: 302582 - DNA, 21 bp, Artificial sequence
  SiRNA target sequence
atctggcggccttacttaaac

SEQ ID NO: 302583 - DNA, 21 bp, Artificial sequence
  SiRNA target sequence
tctggcggccttacttaaacc

SEQ ID NO: 302584 - DNA, 21 bp, Artificial sequence
  SiRNA target sequence
ctggcggccttacttaaaccc

SEQ ID NO: 302585 - DNA, 21 bp, Artificial sequence
  SiRNA target sequence
tggcggccttacttaaaccca

SEQ ID NO: 302586 - DNA, 21 bp, Artificial sequence
  SiRNA target sequence
ggcggccttacttaaacccag

SEQ ID NO: 302587 - DNA, 21 bp, Artificial sequence
  SiRNA target sequence
gcggccttacttaaacccaga

SEQ ID NO: 302588 - DNA, 21 bp, Artificial sequence
  SiRNA target sequence
cggccttacttaaacccagac

SEQ ID NO: 302589 - DNA, 21 bp, Artificial sequence
  SiRNA target sequence
ggccttacttaaacccagaca

SEQ ID NO: 302590 - DNA, 21 bp, Artificial sequence
  SiRNA target sequence
gccttacttaaacccagacat

SEQ ID NO: 302591 - DNA, 21 bp, Artificial sequence
  SiRNA target sequence
ccttacttaaacccagacatc

SEQ ID NO: 302592 - DNA, 21 bp, Artificial sequence
  SiRNA target sequence
cttacttaaacccagacatcg

SEQ ID NO: 302593 - DNA, 21 bp, Artificial sequence
  SiRNA target sequence
ttacttaaacccagacatcgt

SEQ ID NO: 302594 - DNA, 21 bp, Artificial sequence
  SiRNA target sequence
tacttaaacccagacatcgtg

SEQ ID NO: 302595 - DNA, 21 bp, Artificial sequence
  SiRNA target sequence
acttaaacccagacatcgtgt

SEQ ID NO: 302596 - DNA, 21 bp, Artificial sequence
  SiRNA target sequence
cttaaacccagacatcgtgtt

SEQ ID NO: 302597 - DNA, 21 bp, Artificial sequence
  SiRNA target sequence
ttaaacccagacatcgtgttg

SEQ ID NO: 302598 - DNA, 21 bp, Artificial sequence
  SiRNA target sequence
taaacccagacatcgtgttgt

SEQ ID NO: 302599 - DNA, 21 bp, Artificial sequence
  SiRNA target sequence
aaacccagacatcgtgttgtc

SEQ ID NO: 302600 - DNA, 21 bp, Artificial sequence
  SiRNA target sequence
aacccagacatcgtgttgtca

SEQ ID NO: 302601 - DNA, 21 bp, Artificial sequence
  SiRNA target sequence
acccagacatcgtgttgtcat

SEQ ID NO: 302602 - DNA, 21 bp, Artificial sequence
  SiRNA target sequence
cccagacatcgtgttgtcatt

SEQ ID NO: 302603 - DNA, 21 bp, Artificial sequence
  SiRNA target sequence
ccagacatcgtgttgtcattg

SEQ ID NO: 302604 - DNA, 21 bp, Artificial sequence
  SiRNA target sequence
cagacatcgtgttgtcattgt

SEQ ID NO: 302605 - DNA, 21 bp, Artificial sequence
  SiRNA target sequence
agacatcgtgttgtcattgta

SEQ ID NO: 302606 - DNA, 21 bp, Artificial sequence
  SiRNA target sequence
gacatcgtgttgtcattgtac

SEQ ID NO: 302607 - DNA, 21 bp, Artificial sequence
  SiRNA target sequence
acatcgtgttgtcattgtacc

SEQ ID NO: 302608 - DNA, 21 bp, Artificial sequence
  SiRNA target sequence
catcgtgttgtcattgtacct

SEQ ID NO: 302609 - DNA, 21 bp, Artificial sequence
  SiRNA target sequence
atcgtgttgtcattgtaccta

SEQ ID NO: 302610 - DNA, 21 bp, Artificial sequence
  SiRNA target sequence
tcgtgttgtcattgtacctag

SEQ ID NO: 302611 - DNA, 21 bp, Artificial sequence
  SiRNA target sequence
cgtgttgtcattgtacctagg

SEQ ID NO: 302612 - DNA, 21 bp, Artificial sequence
  SiRNA target sequence
gtgttgtcattgtacctaggg

SEQ ID NO: 302613 - DNA, 21 bp, Artificial sequence
  SiRNA target sequence
tgttgtcattgtacctagggt

SEQ ID NO: 302614 - DNA, 21 bp, Artificial sequence
  SiRNA target sequence
gttgtcattgtacctagggtg

SEQ ID NO: 302615 - DNA, 21 bp, Artificial sequence
  SiRNA target sequence
ttgtcattgtacctagggtga

SEQ ID NO: 302616 - DNA, 21 bp, Artificial sequence
  SiRNA target sequence
tgtcattgtacctagggtgac

SEQ ID NO: 302617 - DNA, 21 bp, Artificial sequence
  SiRNA target sequence
gtcattgtacctagggtgact

SEQ ID NO: 302618 - DNA, 21 bp, Artificial sequence
  SiRNA target sequence
tcattgtacctagggtgacta

SEQ ID NO: 302619 - DNA, 21 bp, Artificial sequence
  SiRNA target sequence
cattgtacctagggtgactaa

SEQ ID NO: 302620 - DNA, 21 bp, Artificial sequence
  SiRNA target sequence
attgtacctagggtgactaaa

SEQ ID NO: 302621 - DNA, 21 bp, Artificial sequence
  SiRNA target sequence
ttgtacctagggtgactaaat

SEQ ID NO: 302622 - DNA, 21 bp, Artificial sequence
  SiRNA target sequence
tgtacctagggtgactaaatt

SEQ ID NO: 302623 - DNA, 21 bp, Artificial sequence
  SiRNA target sequence
gtacctagggtgactaaattc

SEQ ID NO: 302624 - DNA, 21 bp, Artificial sequence
  SiRNA target sequence
tacctagggtgactaaattca

SEQ ID NO: 302625 - DNA, 21 bp, Artificial sequence
  SiRNA target sequence
acctagggtgactaaattcat

SEQ ID NO: 302626 - DNA, 21 bp, Artificial sequence
  SiRNA target sequence
cctagggtgactaaattcatt

SEQ ID NO: 302627 - DNA, 21 bp, Artificial sequence
  SiRNA target sequence
ctagggtgactaaattcattt

SEQ ID NO: 302628 - DNA, 21 bp, Artificial sequence
  SiRNA target sequence
tagggtgactaaattcatttt

SEQ ID NO: 302629 - DNA, 21 bp, Artificial sequence
  SiRNA target sequence
agggtgactaaattcattttg

SEQ ID NO: 302630 - DNA, 21 bp, Artificial sequence
  SiRNA target sequence
gggtgactaaattcattttga

SEQ ID NO: 302631 - DNA, 21 bp, Artificial sequence
  SiRNA target sequence
ggtgactaaattcattttgag

SEQ ID NO: 302632 - DNA, 21 bp, Artificial sequence
  SiRNA target sequence
gtgactaaattcattttgagt

SEQ ID NO: 302633 - DNA, 21 bp, Artificial sequence
  SiRNA target sequence
tgactaaattcattttgagta

SEQ ID NO: 302634 - DNA, 21 bp, Artificial sequence
  SiRNA target sequence
gactaaattcattttgagtat

SEQ ID NO: 302635 - DNA, 21 bp, Artificial sequence
  SiRNA target sequence
actaaattcattttgagtatt

SEQ ID NO: 302636 - DNA, 21 bp, Artificial sequence
  SiRNA target sequence
ctaaattcattttgagtatta

SEQ ID NO: 302637 - DNA, 21 bp, Artificial sequence
  SiRNA target sequence
taaattcattttgagtattat

SEQ ID NO: 302638 - DNA, 21 bp, Artificial sequence
  SiRNA target sequence
aaattcattttgagtattatt

SEQ ID NO: 302639 - DNA, 21 bp, Artificial sequence
  SiRNA target sequence
aattcattttgagtattattg

SEQ ID NO: 302640 - DNA, 21 bp, Artificial sequence
  SiRNA target sequence
attcattttgagtattattga

SEQ ID NO: 302641 - DNA, 21 bp, Artificial sequence
  SiRNA target sequence
ttcattttgagtattattgat

SEQ ID NO: 302642 - DNA, 21 bp, Artificial sequence
  SiRNA target sequence
tcattttgagtattattgata

SEQ ID NO: 302643 - DNA, 21 bp, Artificial sequence
  SiRNA target sequence
cattttgagtattattgataa

SEQ ID NO: 302644 - DNA, 21 bp, Artificial sequence
  SiRNA target sequence
attttgagtattattgataac

SEQ ID NO: 302645 - DNA, 21 bp, Artificial sequence
  SiRNA target sequence
ttttgagtattattgataacc

SEQ ID NO: 302646 - DNA, 21 bp, Artificial sequence
  SiRNA target sequence
tttgagtattattgataacca

SEQ ID NO: 302647 - DNA, 21 bp, Artificial sequence
  SiRNA target sequence
ttgagtattattgataaccac

SEQ ID NO: 302648 - DNA, 21 bp, Artificial sequence
  SiRNA target sequence
tgagtattattgataaccact

SEQ ID NO: 302649 - DNA, 21 bp, Artificial sequence
  SiRNA target sequence
gagtattattgataaccactc

SEQ ID NO: 302650 - DNA, 21 bp, Artificial sequence
  SiRNA target sequence
agtattattgataaccactcg

SEQ ID NO: 302651 - DNA, 21 bp, Artificial sequence
  SiRNA target sequence
gtattattgataaccactcga

SEQ ID NO: 302652 - DNA, 21 bp, Artificial sequence
  SiRNA target sequence
tattattgataaccactcgaa

SEQ ID NO: 302653 - DNA, 21 bp, Artificial sequence
  SiRNA target sequence
attattgataaccactcgaaa

SEQ ID NO: 302654 - DNA, 21 bp, Artificial sequence
  SiRNA target sequence
ttattgataaccactcgaaac

SEQ ID NO: 302655 - DNA, 21 bp, Artificial sequence
  SiRNA target sequence
tattgataaccactcgaaact

SEQ ID NO: 302656 - DNA, 21 bp, Artificial sequence
  SiRNA target sequence
attgataaccactcgaaactc

SEQ ID NO: 302657 - DNA, 21 bp, Artificial sequence
  SiRNA target sequence
ttgataaccactcgaaactct

SEQ ID NO: 302658 - DNA, 21 bp, Artificial sequence
  SiRNA target sequence
tgataaccactcgaaactctt

SEQ ID NO: 302659 - DNA, 21 bp, Artificial sequence
  SiRNA target sequence
gataaccactcgaaactcttt

SEQ ID NO: 302660 - DNA, 21 bp, Artificial sequence
  SiRNA target sequence
ataaccactcgaaactctttg

SEQ ID NO: 302661 - DNA, 21 bp, Artificial sequence
  SiRNA target sequence
taaccactcgaaactctttga

SEQ ID NO: 302662 - DNA, 21 bp, Artificial sequence
  SiRNA target sequence
aaccactcgaaactctttgat

SEQ ID NO: 302663 - DNA, 21 bp, Artificial sequence
  SiRNA target sequence
accactcgaaactctttgata

SEQ ID NO: 302664 - DNA, 21 bp, Artificial sequence
  SiRNA target sequence
ccactcgaaactctttgataa

SEQ ID NO: 302665 - DNA, 21 bp, Artificial sequence
  SiRNA target sequence
cactcgaaactctttgataaa

SEQ ID NO: 302666 - DNA, 21 bp, Artificial sequence
  SiRNA target sequence
actcgaaactctttgataaaa

SEQ ID NO: 302667 - DNA, 21 bp, Artificial sequence
  SiRNA target sequence
ctcgaaactctttgataaaac

SEQ ID NO: 302668 - DNA, 21 bp, Artificial sequence
  SiRNA target sequence
tcgaaactctttgataaaacg

SEQ ID NO: 302669 - DNA, 21 bp, Artificial sequence
  SiRNA target sequence
cgaaactctttgataaaacga

SEQ ID NO: 302670 - DNA, 21 bp, Artificial sequence
  SiRNA target sequence
gaaactctttgataaaacgat

SEQ ID NO: 302671 - DNA, 21 bp, Artificial sequence
  SiRNA target sequence
aaactctttgataaaacgatt

SEQ ID NO: 302672 - DNA, 21 bp, Artificial sequence
  SiRNA target sequence
aactctttgataaaacgattt

SEQ ID NO: 302673 - DNA, 21 bp, Artificial sequence
  SiRNA target sequence
actctttgataaaacgatttt

SEQ ID NO: 302674 - DNA, 21 bp, Artificial sequence
  SiRNA target sequence
ctctttgataaaacgatttta

SEQ ID NO: 302675 - DNA, 21 bp, Artificial sequence
  SiRNA target sequence
tctttgataaaacgattttaa

SEQ ID NO: 302676 - DNA, 21 bp, Artificial sequence
  SiRNA target sequence
ctttgataaaacgattttaat

SEQ ID NO: 302677 - DNA, 21 bp, Artificial sequence
  SiRNA target sequence
tttgataaaacgattttaatt

SEQ ID NO: 302678 - DNA, 21 bp, Artificial sequence
  SiRNA target sequence
ttgataaaacgattttaatta

SEQ ID NO: 302679 - DNA, 21 bp, Artificial sequence
  SiRNA target sequence
tgataaaacgattttaattac

SEQ ID NO: 302680 - DNA, 21 bp, Artificial sequence
  SiRNA target sequence
gataaaacgattttaattacc

SEQ ID NO: 302681 - DNA, 21 bp, Artificial sequence
  SiRNA target sequence
ataaaacgattttaattacca

SEQ ID NO: 302682 - DNA, 21 bp, Artificial sequence
  SiRNA target sequence
taaaacgattttaattaccaa

SEQ ID NO: 302683 - DNA, 21 bp, Artificial sequence
  SiRNA target sequence
aaaacgattttaattaccaag

SEQ ID NO: 302684 - DNA, 21 bp, Artificial sequence
  SiRNA target sequence
aaacgattttaattaccaaga

SEQ ID NO: 302685 - DNA, 21 bp, Artificial sequence
  SiRNA target sequence
aacgattttaattaccaagaa

SEQ ID NO: 302686 - DNA, 21 bp, Artificial sequence
  SiRNA target sequence
acgattttaattaccaagaac

SEQ ID NO: 302687 - DNA, 21 bp, Artificial sequence
  SiRNA target sequence
cgattttaattaccaagaacc

SEQ ID NO: 302688 - DNA, 21 bp, Artificial sequence
  SiRNA target sequence
gattttaattaccaagaaccg

SEQ ID NO: 302689 - DNA, 21 bp, Artificial sequence
  SiRNA target sequence
attttaattaccaagaaccga

SEQ ID NO: 302690 - DNA, 21 bp, Artificial sequence
  SiRNA target sequence
ttttaattaccaagaaccgat

SEQ ID NO: 302691 - DNA, 21 bp, Artificial sequence
  SiRNA target sequence
tttaattaccaagaaccgatt

SEQ ID NO: 302692 - DNA, 21 bp, Artificial sequence
  SiRNA target sequence
ttaattaccaagaaccgattc

SEQ ID NO: 302693 - DNA, 21 bp, Artificial sequence
  SiRNA target sequence
taattaccaagaaccgattct

SEQ ID NO: 302694 - DNA, 21 bp, Artificial sequence
  SiRNA target sequence
aattaccaagaaccgattctt

SEQ ID NO: 302695 - DNA, 21 bp, Artificial sequence
  SiRNA target sequence
attaccaagaaccgattcttt

SEQ ID NO: 302696 - DNA, 21 bp, Artificial sequence
  SiRNA target sequence
ttaccaagaaccgattcttta

SEQ ID NO: 302697 - DNA, 21 bp, Artificial sequence
  SiRNA target sequence
taccaagaaccgattctttac

SEQ ID NO: 302698 - DNA, 21 bp, Artificial sequence
  SiRNA target sequence
accaagaaccgattctttact

SEQ ID NO: 302699 - DNA, 21 bp, Artificial sequence
  SiRNA target sequence
ccaagaaccgattctttactt

SEQ ID NO: 302700 - DNA, 21 bp, Artificial sequence
  SiRNA target sequence
caagaaccgattctttactta

SEQ ID NO: 302701 - DNA, 21 bp, Artificial sequence
  SiRNA target sequence
aagaaccgattctttacttat

SEQ ID NO: 302702 - DNA, 21 bp, Artificial sequence
  SiRNA target sequence
agaaccgattctttacttatg

SEQ ID NO: 302703 - DNA, 21 bp, Artificial sequence
  SiRNA target sequence
gaaccgattctttacttatga

SEQ ID NO: 302704 - DNA, 21 bp, Artificial sequence
  SiRNA target sequence
aaccgattctttacttatgaa

SEQ ID NO: 302705 - DNA, 21 bp, Artificial sequence
  SiRNA target sequence
accgattctttacttatgaaa

SEQ ID NO: 302706 - DNA, 21 bp, Artificial sequence
  SiRNA target sequence
ccgattctttacttatgaaaa

SEQ ID NO: 302707 - DNA, 21 bp, Artificial sequence
  SiRNA target sequence
cgattctttacttatgaaaat

SEQ ID NO: 302708 - DNA, 21 bp, Artificial sequence
  SiRNA target sequence
gattctttacttatgaaaata

SEQ ID NO: 302709 - DNA, 21 bp, Artificial sequence
  SiRNA target sequence
attctttacttatgaaaataa

SEQ ID NO: 302710 - DNA, 21 bp, Artificial sequence
  SiRNA target sequence
ttctttacttatgaaaataaa

SEQ ID NO: 302711 - DNA, 21 bp, Artificial sequence
  SiRNA target sequence
tctttacttatgaaaataaat

SEQ ID NO: 302712 - DNA, 21 bp, Artificial sequence
  SiRNA target sequence
ctttacttatgaaaataaata

SEQ ID NO: 302713 - DNA, 21 bp, Artificial sequence
  SiRNA target sequence
tttacttatgaaaataaatat

SEQ ID NO: 302714 - DNA, 21 bp, Artificial sequence
  SiRNA target sequence
ttacttatgaaaataaatata

SEQ ID NO: 302715 - DNA, 21 bp, Artificial sequence
  SiRNA target sequence
tacttatgaaaataaatatat

SEQ ID NO: 302716 - DNA, 21 bp, Artificial sequence
  SiRNA target sequence
acttatgaaaataaatatatt

SEQ ID NO: 302717 - DNA, 21 bp, Artificial sequence
  SiRNA target sequence
cttatgaaaataaatatattg

SEQ ID NO: 302718 - DNA, 21 bp, Artificial sequence
  SiRNA target sequence
ttatgaaaataaatatattga

SEQ ID NO: 302719 - DNA, 21 bp, Artificial sequence
  SiRNA target sequence
tatgaaaataaatatattgaa

SEQ ID NO: 302720 - DNA, 21 bp, Artificial sequence
  SiRNA target sequence
atgaaaataaatatattgaat

SEQ ID NO: 302721 - DNA, 21 bp, Artificial sequence
  SiRNA target sequence
tgaaaataaatatattgaatt

SEQ ID NO: 302722 - DNA, 21 bp, Artificial sequence
  SiRNA target sequence
gaaaataaatatattgaattg

SEQ ID NO: 302723 - DNA, 21 bp, Artificial sequence
  SiRNA target sequence
aaaataaatatattgaattgg

SEQ ID NO: 302724 - DNA, 21 bp, Artificial sequence
  SiRNA target sequence
aaataaatatattgaattggt

SEQ ID NO: 302725 - DNA, 21 bp, Artificial sequence
  SiRNA target sequence
aataaatatattgaattggtg

SEQ ID NO: 302726 - DNA, 21 bp, Artificial sequence
  SiRNA target sequence
ataaatatattgaattggtgt

SEQ ID NO: 302727 - DNA, 21 bp, Artificial sequence
  SiRNA target sequence
taaatatattgaattggtgtg

SEQ ID NO: 302728 - DNA, 21 bp, Artificial sequence
  SiRNA target sequence
aaatatattgaattggtgtgt

SEQ ID NO: 302729 - DNA, 21 bp, Artificial sequence
  SiRNA target sequence
aatatattgaattggtgtgtg

SEQ ID NO: 302730 - DNA, 21 bp, Artificial sequence
  SiRNA target sequence
atatattgaattggtgtgtgg

SEQ ID NO: 302731 - DNA, 21 bp, Artificial sequence
  SiRNA target sequence
tatattgaattggtgtgtggt

SEQ ID NO: 302732 - DNA, 21 bp, Artificial sequence
  SiRNA target sequence
atattgaattggtgtgtggtg

SEQ ID NO: 302733 - DNA, 21 bp, Artificial sequence
  SiRNA target sequence
tattgaattggtgtgtggtga

SEQ ID NO: 302734 - DNA, 21 bp, Artificial sequence
  SiRNA target sequence
attgaattggtgtgtggtgag

SEQ ID NO: 302735 - DNA, 21 bp, Artificial sequence
  SiRNA target sequence
ttgaattggtgtgtggtgaga

SEQ ID NO: 302736 - DNA, 21 bp, Artificial sequence
  SiRNA target sequence
tgaattggtgtgtggtgagat

SEQ ID NO: 302737 - DNA, 21 bp, Artificial sequence
  SiRNA target sequence
gaattggtgtgtggtgagatg

SEQ ID NO: 302738 - DNA, 21 bp, Artificial sequence
  SiRNA target sequence
aattggtgtgtggtgagatga

SEQ ID NO: 302739 - DNA, 21 bp, Artificial sequence
  SiRNA target sequence
attggtgtgtggtgagatgaa

SEQ ID NO: 302740 - DNA, 21 bp, Artificial sequence
  SiRNA target sequence
ttggtgtgtggtgagatgaat

SEQ ID NO: 302741 - DNA, 21 bp, Artificial sequence
  SiRNA target sequence
tggtgtgtggtgagatgaatc

SEQ ID NO: 302742 - DNA, 21 bp, Artificial sequence
  SiRNA target sequence
ggtgtgtggtgagatgaatcg

SEQ ID NO: 302743 - DNA, 21 bp, Artificial sequence
  SiRNA target sequence
gtgtgtggtgagatgaatcgt

SEQ ID NO: 302744 - DNA, 21 bp, Artificial sequence
  SiRNA target sequence
tgtgtggtgagatgaatcgtt

SEQ ID NO: 302745 - DNA, 21 bp, Artificial sequence
  SiRNA target sequence
gtgtggtgagatgaatcgttt

SEQ ID NO: 302746 - DNA, 21 bp, Artificial sequence
  SiRNA target sequence
tgtggtgagatgaatcgtttc

SEQ ID NO: 302747 - DNA, 21 bp, Artificial sequence
  SiRNA target sequence
gtggtgagatgaatcgtttct

SEQ ID NO: 302748 - DNA, 21 bp, Artificial sequence
  SiRNA target sequence
tggtgagatgaatcgtttctt

SEQ ID NO: 302749 - DNA, 21 bp, Artificial sequence
  SiRNA target sequence
ggtgagatgaatcgtttcttt

SEQ ID NO: 302750 - DNA, 21 bp, Artificial sequence
  SiRNA target sequence
gtgagatgaatcgtttctttg

SEQ ID NO: 302751 - DNA, 21 bp, Artificial sequence
  SiRNA target sequence
tgagatgaatcgtttctttga

SEQ ID NO: 302752 - DNA, 21 bp, Artificial sequence
  SiRNA target sequence
gagatgaatcgtttctttgaa

SEQ ID NO: 302753 - DNA, 21 bp, Artificial sequence
  SiRNA target sequence
agatgaatcgtttctttgaag

SEQ ID NO: 302754 - DNA, 21 bp, Artificial sequence
  SiRNA target sequence
gatgaatcgtttctttgaaga

SEQ ID NO: 302755 - DNA, 21 bp, Artificial sequence
  SiRNA target sequence
atgaatcgtttctttgaagaa

SEQ ID NO: 302756 - DNA, 21 bp, Artificial sequence
  SiRNA target sequence
tgaatcgtttctttgaagaag

SEQ ID NO: 302757 - DNA, 21 bp, Artificial sequence
  SiRNA target sequence
gaatcgtttctttgaagaaga

SEQ ID NO: 302758 - DNA, 21 bp, Artificial sequence
  SiRNA target sequence
aatcgtttctttgaagaagac

SEQ ID NO: 302759 - DNA, 21 bp, Artificial sequence
  SiRNA target sequence
atcgtttctttgaagaagacc

SEQ ID NO: 302760 - DNA, 21 bp, Artificial sequence
  SiRNA target sequence
tcgtttctttgaagaagaccc

SEQ ID NO: 302761 - DNA, 21 bp, Artificial sequence
  SiRNA target sequence
cgtttctttgaagaagacccg

SEQ ID NO: 302762 - DNA, 21 bp, Artificial sequence
  SiRNA target sequence
gtttctttgaagaagacccgg

SEQ ID NO: 302763 - DNA, 21 bp, Artificial sequence
  SiRNA target sequence
tttctttgaagaagacccgga

SEQ ID NO: 302764 - DNA, 21 bp, Artificial sequence
  SiRNA target sequence
ttctttgaagaagacccggaa

SEQ ID NO: 302765 - DNA, 21 bp, Artificial sequence
  SiRNA target sequence
tctttgaagaagacccggaat

SEQ ID NO: 302766 - DNA, 21 bp, Artificial sequence
  SiRNA target sequence
ctttgaagaagacccggaatc

SEQ ID NO: 302767 - DNA, 21 bp, Artificial sequence
  SiRNA target sequence
tttgaagaagacccggaatca

SEQ ID NO: 302768 - DNA, 21 bp, Artificial sequence
  SiRNA target sequence
ttgaagaagacccggaatcac

SEQ ID NO: 302769 - DNA, 21 bp, Artificial sequence
  SiRNA target sequence
tgaagaagacccggaatcact

SEQ ID NO: 302770 - DNA, 21 bp, Artificial sequence
  SiRNA target sequence
gaagaagacccggaatcactt

SEQ ID NO: 302771 - DNA, 21 bp, Artificial sequence
  SiRNA target sequence
aagaagacccggaatcacttg

SEQ ID NO: 302772 - DNA, 21 bp, Artificial sequence
  SiRNA target sequence
agaagacccggaatcacttgt

SEQ ID NO: 302773 - DNA, 21 bp, Artificial sequence
  SiRNA target sequence
gaagacccggaatcacttgta

SEQ ID NO: 302774 - DNA, 21 bp, Artificial sequence
  SiRNA target sequence
aagacccggaatcacttgtaa

SEQ ID NO: 302775 - DNA, 21 bp, Artificial sequence
  SiRNA target sequence
agacccggaatcacttgtaaa

SEQ ID NO: 302776 - DNA, 21 bp, Artificial sequence
  SiRNA target sequence
gacccggaatcacttgtaaat

SEQ ID NO: 302777 - DNA, 21 bp, Artificial sequence
  SiRNA target sequence
acccggaatcacttgtaaata

SEQ ID NO: 302778 - DNA, 21 bp, Artificial sequence
  SiRNA target sequence
cccggaatcacttgtaaatac

SEQ ID NO: 302779 - DNA, 21 bp, Artificial sequence
  SiRNA target sequence
ccggaatcacttgtaaataca

SEQ ID NO: 302780 - DNA, 21 bp, Artificial sequence
  SiRNA target sequence
cggaatcacttgtaaatacac

SEQ ID NO: 302781 - DNA, 21 bp, Artificial sequence
  SiRNA target sequence
ggaatcacttgtaaatacacc

SEQ ID NO: 302782 - DNA, 21 bp, Artificial sequence
  SiRNA target sequence
gaatcacttgtaaatacacca

SEQ ID NO: 302783 - DNA, 21 bp, Artificial sequence
  SiRNA target sequence
aatcacttgtaaatacaccaa

SEQ ID NO: 302784 - DNA, 21 bp, Artificial sequence
  SiRNA target sequence
atcacttgtaaatacaccaaa

SEQ ID NO: 302785 - DNA, 21 bp, Artificial sequence
  SiRNA target sequence
tcacttgtaaatacaccaaaa

SEQ ID NO: 302786 - DNA, 21 bp, Artificial sequence
  SiRNA target sequence
cacttgtaaatacaccaaaag

SEQ ID NO: 302787 - DNA, 21 bp, Artificial sequence
  SiRNA target sequence
acttgtaaatacaccaaaagt

SEQ ID NO: 302788 - DNA, 21 bp, Artificial sequence
  SiRNA target sequence
cttgtaaatacaccaaaagta

SEQ ID NO: 302789 - DNA, 21 bp, Artificial sequence
  SiRNA target sequence
ttgtaaatacaccaaaagtag

SEQ ID NO: 302790 - DNA, 21 bp, Artificial sequence
  SiRNA target sequence
tgtaaatacaccaaaagtaga

SEQ ID NO: 302791 - DNA, 21 bp, Artificial sequence
  SiRNA target sequence
gtaaatacaccaaaagtagaa

SEQ ID NO: 302792 - DNA, 21 bp, Artificial sequence
  SiRNA target sequence
taaatacaccaaaagtagaag

SEQ ID NO: 302793 - DNA, 21 bp, Artificial sequence
  SiRNA target sequence
aaatacaccaaaagtagaagc

SEQ ID NO: 302794 - DNA, 21 bp, Artificial sequence
  SiRNA target sequence
aatacaccaaaagtagaagct

SEQ ID NO: 302795 - DNA, 21 bp, Artificial sequence
  SiRNA target sequence
atacaccaaaagtagaagctt

SEQ ID NO: 302796 - DNA, 21 bp, Artificial sequence
  SiRNA target sequence
tacaccaaaagtagaagcttt

SEQ ID NO: 302797 - DNA, 21 bp, Artificial sequence
  SiRNA target sequence
acaccaaaagtagaagctttt

SEQ ID NO: 302798 - DNA, 21 bp, Artificial sequence
  SiRNA target sequence
caccaaaagtagaagcttttg

SEQ ID NO: 302799 - DNA, 21 bp, Artificial sequence
  SiRNA target sequence
accaaaagtagaagcttttgc

SEQ ID NO: 302800 - DNA, 21 bp, Artificial sequence
  SiRNA target sequence
ccaaaagtagaagcttttgct

SEQ ID NO: 302801 - DNA, 21 bp, Artificial sequence
  SiRNA target sequence
caaaagtagaagcttttgctt

SEQ ID NO: 302802 - DNA, 21 bp, Artificial sequence
  SiRNA target sequence
aaaagtagaagcttttgcttc

SEQ ID NO: 302803 - DNA, 21 bp, Artificial sequence
  SiRNA target sequence
aaagtagaagcttttgcttct

SEQ ID NO: 302804 - DNA, 21 bp, Artificial sequence
  SiRNA target sequence
aagtagaagcttttgcttctg

SEQ ID NO: 302805 - DNA, 21 bp, Artificial sequence
  SiRNA target sequence
agtagaagcttttgcttctgc

SEQ ID NO: 302806 - DNA, 21 bp, Artificial sequence
  SiRNA target sequence
gtagaagcttttgcttctgct

SEQ ID NO: 302807 - DNA, 21 bp, Artificial sequence
  SiRNA target sequence
tagaagcttttgcttctgctg

SEQ ID NO: 302808 - DNA, 21 bp, Artificial sequence
  SiRNA target sequence
agaagcttttgcttctgctga

SEQ ID NO: 302809 - DNA, 21 bp, Artificial sequence
  SiRNA target sequence
gaagcttttgcttctgctgat

SEQ ID NO: 302810 - DNA, 21 bp, Artificial sequence
  SiRNA target sequence
aagcttttgcttctgctgatt

SEQ ID NO: 302811 - DNA, 21 bp, Artificial sequence
  SiRNA target sequence
agcttttgcttctgctgattt

SEQ ID NO: 302812 - DNA, 21 bp, Artificial sequence
  SiRNA target sequence
gcttttgcttctgctgatttg

SEQ ID NO: 302813 - DNA, 21 bp, Artificial sequence
  SiRNA target sequence
cttttgcttctgctgatttgg

SEQ ID NO: 302814 - DNA, 21 bp, Artificial sequence
  SiRNA target sequence
ttttgcttctgctgatttggc

SEQ ID NO: 302815 - DNA, 21 bp, Artificial sequence
  SiRNA target sequence
tttgcttctgctgatttggct

SEQ ID NO: 302816 - DNA, 21 bp, Artificial sequence
  SiRNA target sequence
ttgcttctgctgatttggcta

SEQ ID NO: 302817 - DNA, 21 bp, Artificial sequence
  SiRNA target sequence
tgcttctgctgatttggctac

SEQ ID NO: 302818 - DNA, 21 bp, Artificial sequence
  SiRNA target sequence
gcttctgctgatttggctact

SEQ ID NO: 302819 - DNA, 21 bp, Artificial sequence
  SiRNA target sequence
cttctgctgatttggctactt

SEQ ID NO: 302820 - DNA, 21 bp, Artificial sequence
  SiRNA target sequence
ttctgctgatttggctactta

SEQ ID NO: 302821 - DNA, 21 bp, Artificial sequence
  SiRNA target sequence
tctgctgatttggctacttat

SEQ ID NO: 302822 - DNA, 21 bp, Artificial sequence
  SiRNA target sequence
ctgctgatttggctacttata

SEQ ID NO: 302823 - DNA, 21 bp, Artificial sequence
  SiRNA target sequence
tgctgatttggctacttataa

SEQ ID NO: 302824 - DNA, 21 bp, Artificial sequence
  SiRNA target sequence
gctgatttggctacttataaa

SEQ ID NO: 302825 - DNA, 21 bp, Artificial sequence
  SiRNA target sequence
ctgatttggctacttataaaa

SEQ ID NO: 302826 - DNA, 21 bp, Artificial sequence
  SiRNA target sequence
tgatttggctacttataaaaa

SEQ ID NO: 302827 - DNA, 21 bp, Artificial sequence
  SiRNA target sequence
gatttggctacttataaaaac

SEQ ID NO: 302828 - DNA, 21 bp, Artificial sequence
  SiRNA target sequence
atttggctacttataaaaaca

SEQ ID NO: 302829 - DNA, 21 bp, Artificial sequence
  SiRNA target sequence
tttggctacttataaaaacag

SEQ ID NO: 302830 - DNA, 21 bp, Artificial sequence
  SiRNA target sequence
ttggctacttataaaaacagg

SEQ ID NO: 302831 - DNA, 21 bp, Artificial sequence
  SiRNA target sequence
tggctacttataaaaacagga

SEQ ID NO: 302832 - DNA, 21 bp, Artificial sequence
  SiRNA target sequence
ggctacttataaaaacaggac

SEQ ID NO: 302833 - DNA, 21 bp, Artificial sequence
  SiRNA target sequence
gctacttataaaaacaggact

SEQ ID NO: 302834 - DNA, 21 bp, Artificial sequence
  SiRNA target sequence
ctacttataaaaacaggactc

SEQ ID NO: 302835 - DNA, 21 bp, Artificial sequence
  SiRNA target sequence
tacttataaaaacaggactcc

SEQ ID NO: 302836 - DNA, 21 bp, Artificial sequence
  SiRNA target sequence
acttataaaaacaggactccg

SEQ ID NO: 302837 - DNA, 21 bp, Artificial sequence
  SiRNA target sequence
cttataaaaacaggactccga

SEQ ID NO: 302838 - DNA, 21 bp, Artificial sequence
  SiRNA target sequence
ttataaaaacaggactccgat

SEQ ID NO: 302839 - DNA, 21 bp, Artificial sequence
  SiRNA target sequence
tataaaaacaggactccgata

SEQ ID NO: 302840 - DNA, 21 bp, Artificial sequence
  SiRNA target sequence
ataaaaacaggactccgatag

SEQ ID NO: 302841 - DNA, 21 bp, Artificial sequence
  SiRNA target sequence
taaaaacaggactccgatagt

SEQ ID NO: 302842 - DNA, 21 bp, Artificial sequence
  SiRNA target sequence
aaaaacaggactccgatagtt

SEQ ID NO: 302843 - DNA, 21 bp, Artificial sequence
  SiRNA target sequence
aaaacaggactccgatagtta

SEQ ID NO: 302844 - DNA, 21 bp, Artificial sequence
  SiRNA target sequence
aaacaggactccgatagttat

SEQ ID NO: 302845 - DNA, 21 bp, Artificial sequence
  SiRNA target sequence
aacaggactccgatagttatt

SEQ ID NO: 302846 - DNA, 21 bp, Artificial sequence
  SiRNA target sequence
acaggactccgatagttattg

SEQ ID NO: 302847 - DNA, 21 bp, Artificial sequence
  SiRNA target sequence
caggactccgatagttattga

SEQ ID NO: 302848 - DNA, 21 bp, Artificial sequence
  SiRNA target sequence
aggactccgatagttattgag

SEQ ID NO: 302849 - DNA, 21 bp, Artificial sequence
  SiRNA target sequence
ggactccgatagttattgagg

SEQ ID NO: 302850 - DNA, 21 bp, Artificial sequence
  SiRNA target sequence
gactccgatagttattgaggc

SEQ ID NO: 302851 - DNA, 21 bp, Artificial sequence
  SiRNA target sequence
actccgatagttattgaggca

SEQ ID NO: 302852 - DNA, 21 bp, Artificial sequence
  SiRNA target sequence
ctccgatagttattgaggcac

SEQ ID NO: 302853 - DNA, 21 bp, Artificial sequence
  SiRNA target sequence
tccgatagttattgaggcaca

SEQ ID NO: 302854 - DNA, 21 bp, Artificial sequence
  SiRNA target sequence
ccgatagttattgaggcacaa

SEQ ID NO: 302855 - DNA, 21 bp, Artificial sequence
  SiRNA target sequence
cgatagttattgaggcacaaa

SEQ ID NO: 302856 - DNA, 21 bp, Artificial sequence
  SiRNA target sequence
gatagttattgaggcacaaac

SEQ ID NO: 302857 - DNA, 21 bp, Artificial sequence
  SiRNA target sequence
atagttattgaggcacaaaca

SEQ ID NO: 302858 - DNA, 21 bp, Artificial sequence
  SiRNA target sequence
tagttattgaggcacaaacat

SEQ ID NO: 302859 - DNA, 21 bp, Artificial sequence
  SiRNA target sequence
agttattgaggcacaaacatc

SEQ ID NO: 302860 - DNA, 21 bp, Artificial sequence
  SiRNA target sequence
gttattgaggcacaaacatca

SEQ ID NO: 302861 - DNA, 21 bp, Artificial sequence
  SiRNA target sequence
ttattgaggcacaaacatcag

SEQ ID NO: 302862 - DNA, 21 bp, Artificial sequence
  SiRNA target sequence
tattgaggcacaaacatcagg

SEQ ID NO: 302863 - DNA, 21 bp, Artificial sequence
  SiRNA target sequence
attgaggcacaaacatcagga

SEQ ID NO: 302864 - DNA, 21 bp, Artificial sequence
  SiRNA target sequence
ttgaggcacaaacatcaggag

SEQ ID NO: 302865 - DNA, 21 bp, Artificial sequence
  SiRNA target sequence
tgaggcacaaacatcaggaga

SEQ ID NO: 302866 - DNA, 21 bp, Artificial sequence
  SiRNA target sequence
gaggcacaaacatcaggagat

SEQ ID NO: 302867 - DNA, 21 bp, Artificial sequence
  SiRNA target sequence
aggcacaaacatcaggagata

SEQ ID NO: 302868 - DNA, 21 bp, Artificial sequence
  SiRNA target sequence
ggcacaaacatcaggagataa

SEQ ID NO: 302869 - DNA, 21 bp, Artificial sequence
  SiRNA target sequence
gcacaaacatcaggagataat

SEQ ID NO: 302870 - DNA, 21 bp, Artificial sequence
  SiRNA target sequence
cacaaacatcaggagataata

SEQ ID NO: 302871 - DNA, 21 bp, Artificial sequence
  SiRNA target sequence
acaaacatcaggagataatat

SEQ ID NO: 302872 - DNA, 21 bp, Artificial sequence
  SiRNA target sequence
caaacatcaggagataatatg

SEQ ID NO: 302873 - DNA, 21 bp, Artificial sequence
  SiRNA target sequence
aaacatcaggagataatatga

SEQ ID NO: 302874 - DNA, 21 bp, Artificial sequence
  SiRNA target sequence
aacatcaggagataatatgac

SEQ ID NO: 302875 - DNA, 21 bp, Artificial sequence
  SiRNA target sequence
acatcaggagataatatgact

SEQ ID NO: 302876 - DNA, 21 bp, Artificial sequence
  SiRNA target sequence
catcaggagataatatgactc

SEQ ID NO: 302877 - DNA, 21 bp, Artificial sequence
  SiRNA target sequence
atcaggagataatatgactct

SEQ ID NO: 302878 - DNA, 21 bp, Artificial sequence
  SiRNA target sequence
tcaggagataatatgactctt

SEQ ID NO: 302879 - DNA, 21 bp, Artificial sequence
  SiRNA target sequence
caggagataatatgactctta

SEQ ID NO: 302880 - DNA, 21 bp, Artificial sequence
  SiRNA target sequence
aggagataatatgactcttaa

SEQ ID NO: 302881 - DNA, 21 bp, Artificial sequence
  SiRNA target sequence
ggagataatatgactcttaaa

SEQ ID NO: 302882 - DNA, 21 bp, Artificial sequence
  SiRNA target sequence
gagataatatgactcttaaac

SEQ ID NO: 302883 - DNA, 21 bp, Artificial sequence
  SiRNA target sequence
agataatatgactcttaaaca

SEQ ID NO: 302884 - DNA, 21 bp, Artificial sequence
  SiRNA target sequence
gataatatgactcttaaacaa

SEQ ID NO: 302885 - DNA, 21 bp, Artificial sequence
  SiRNA target sequence
ataatatgactcttaaacaac

SEQ ID NO: 302886 - DNA, 21 bp, Artificial sequence
  SiRNA target sequence
taatatgactcttaaacaacc

SEQ ID NO: 302887 - DNA, 21 bp, Artificial sequence
  SiRNA target sequence
aatatgactcttaaacaacca

SEQ ID NO: 302888 - DNA, 21 bp, Artificial sequence
  SiRNA target sequence
atatgactcttaaacaaccac

SEQ ID NO: 302889 - DNA, 21 bp, Artificial sequence
  SiRNA target sequence
tatgactcttaaacaaccacg

SEQ ID NO: 302890 - DNA, 21 bp, Artificial sequence
  SiRNA target sequence
atgactcttaaacaaccacga

SEQ ID NO: 302891 - DNA, 21 bp, Artificial sequence
  SiRNA target sequence
tgactcttaaacaaccacgac

SEQ ID NO: 302892 - DNA, 21 bp, Artificial sequence
  SiRNA target sequence
gactcttaaacaaccacgacc

SEQ ID NO: 302893 - DNA, 21 bp, Artificial sequence
  SiRNA target sequence
actcttaaacaaccacgacca

SEQ ID NO: 302894 - DNA, 21 bp, Artificial sequence
  SiRNA target sequence
ctcttaaacaaccacgaccag

SEQ ID NO: 302895 - DNA, 21 bp, Artificial sequence
  SiRNA target sequence
tcttaaacaaccacgaccagt

SEQ ID NO: 302896 - DNA, 21 bp, Artificial sequence
  SiRNA target sequence
cttaaacaaccacgaccagtt

SEQ ID NO: 302897 - DNA, 21 bp, Artificial sequence
  SiRNA target sequence
ttaaacaaccacgaccagttg

SEQ ID NO: 302898 - DNA, 21 bp, Artificial sequence
  SiRNA target sequence
taaacaaccacgaccagttgt

SEQ ID NO: 302899 - DNA, 21 bp, Artificial sequence
  SiRNA target sequence
aaacaaccacgaccagttgtt

SEQ ID NO: 302900 - DNA, 21 bp, Artificial sequence
  SiRNA target sequence
aacaaccacgaccagttgtta

SEQ ID NO: 302901 - DNA, 21 bp, Artificial sequence
  SiRNA target sequence
acaaccacgaccagttgttat

SEQ ID NO: 302902 - DNA, 21 bp, Artificial sequence
  SiRNA target sequence
caaccacgaccagttgttata

SEQ ID NO: 302903 - DNA, 21 bp, Artificial sequence
  SiRNA target sequence
aaccacgaccagttgttatag

SEQ ID NO: 302904 - DNA, 21 bp, Artificial sequence
  SiRNA target sequence
accacgaccagttgttataga

SEQ ID NO: 302905 - DNA, 21 bp, Artificial sequence
  SiRNA target sequence
ccacgaccagttgttatagaa

SEQ ID NO: 302906 - DNA, 21 bp, Artificial sequence
  SiRNA target sequence
cacgaccagttgttatagaag

SEQ ID NO: 302907 - DNA, 21 bp, Artificial sequence
  SiRNA target sequence
acgaccagttgttatagaagc

SEQ ID NO: 302908 - DNA, 21 bp, Artificial sequence
  SiRNA target sequence
cgaccagttgttatagaagct

SEQ ID NO: 302909 - DNA, 21 bp, Artificial sequence
  SiRNA target sequence
gaccagttgttatagaagctc

SEQ ID NO: 302910 - DNA, 21 bp, Artificial sequence
  SiRNA target sequence
accagttgttatagaagctca

SEQ ID NO: 302911 - DNA, 21 bp, Artificial sequence
  SiRNA target sequence
ccagttgttatagaagctcag

SEQ ID NO: 302912 - DNA, 21 bp, Artificial sequence
  SiRNA target sequence
cagttgttatagaagctcaga

SEQ ID NO: 302913 - DNA, 21 bp, Artificial sequence
  SiRNA target sequence
agttgttatagaagctcagac

SEQ ID NO: 302914 - DNA, 21 bp, Artificial sequence
  SiRNA target sequence
gttgttatagaagctcagaca

SEQ ID NO: 302915 - DNA, 21 bp, Artificial sequence
  SiRNA target sequence
ttgttatagaagctcagacat

SEQ ID NO: 302916 - DNA, 21 bp, Artificial sequence
  SiRNA target sequence
tgttatagaagctcagacatc

SEQ ID NO: 302917 - DNA, 21 bp, Artificial sequence
  SiRNA target sequence
gttatagaagctcagacatct

SEQ ID NO: 302918 - DNA, 21 bp, Artificial sequence
  SiRNA target sequence
ttatagaagctcagacatctg

SEQ ID NO: 302919 - DNA, 21 bp, Artificial sequence
  SiRNA target sequence
tatagaagctcagacatctgc

SEQ ID NO: 302920 - DNA, 21 bp, Artificial sequence
  SiRNA target sequence
atagaagctcagacatctgct

SEQ ID NO: 302921 - DNA, 21 bp, Artificial sequence
  SiRNA target sequence
tagaagctcagacatctgctg

SEQ ID NO: 302922 - DNA, 21 bp, Artificial sequence
  SiRNA target sequence
agaagctcagacatctgctga

SEQ ID NO: 302923 - DNA, 21 bp, Artificial sequence
  SiRNA target sequence
gaagctcagacatctgctgat

SEQ ID NO: 302924 - DNA, 21 bp, Artificial sequence
  SiRNA target sequence
aagctcagacatctgctgatt

SEQ ID NO: 302925 - DNA, 21 bp, Artificial sequence
  SiRNA target sequence
agctcagacatctgctgattg

SEQ ID NO: 302926 - DNA, 21 bp, Artificial sequence
  SiRNA target sequence
gctcagacatctgctgattgt

SEQ ID NO: 302927 - DNA, 21 bp, Artificial sequence
  SiRNA target sequence
ctcagacatctgctgattgtg

SEQ ID NO: 302928 - DNA, 21 bp, Artificial sequence
  SiRNA target sequence
tcagacatctgctgattgtgt

SEQ ID NO: 302929 - DNA, 21 bp, Artificial sequence
  SiRNA target sequence
cagacatctgctgattgtgtt

SEQ ID NO: 302930 - DNA, 21 bp, Artificial sequence
  SiRNA target sequence
agacatctgctgattgtgtta

SEQ ID NO: 302931 - DNA, 21 bp, Artificial sequence
  SiRNA target sequence
gacatctgctgattgtgttac

SEQ ID NO: 302932 - DNA, 21 bp, Artificial sequence
  SiRNA target sequence
acatctgctgattgtgttact

SEQ ID NO: 302933 - DNA, 21 bp, Artificial sequence
  SiRNA target sequence
catctgctgattgtgttactt

SEQ ID NO: 302934 - DNA, 21 bp, Artificial sequence
  SiRNA target sequence
atctgctgattgtgttacttt

SEQ ID NO: 302935 - DNA, 21 bp, Artificial sequence
  SiRNA target sequence
tctgctgattgtgttacttta

SEQ ID NO: 302936 - DNA, 21 bp, Artificial sequence
  SiRNA target sequence
ctgctgattgtgttactttag

SEQ ID NO: 302937 - DNA, 21 bp, Artificial sequence
  SiRNA target sequence
tgctgattgtgttactttagc

SEQ ID NO: 302938 - DNA, 21 bp, Artificial sequence
  SiRNA target sequence
gctgattgtgttactttagct

SEQ ID NO: 302939 - DNA, 21 bp, Artificial sequence
  SiRNA target sequence
ctgattgtgttactttagcta

SEQ ID NO: 302940 - DNA, 21 bp, Artificial sequence
  SiRNA target sequence
tgattgtgttactttagctaa

SEQ ID NO: 302941 - DNA, 21 bp, Artificial sequence
  SiRNA target sequence
gattgtgttactttagctaaa

SEQ ID NO: 302942 - DNA, 21 bp, Artificial sequence
  SiRNA target sequence
attgtgttactttagctaaaa

SEQ ID NO: 302943 - DNA, 21 bp, Artificial sequence
  SiRNA target sequence
ttgtgttactttagctaaaaa

SEQ ID NO: 302944 - DNA, 21 bp, Artificial sequence
  SiRNA target sequence
tgtgttactttagctaaaaac

SEQ ID NO: 302945 - DNA, 21 bp, Artificial sequence
  SiRNA target sequence
gtgttactttagctaaaaaca

SEQ ID NO: 302946 - DNA, 21 bp, Artificial sequence
  SiRNA target sequence
tgttactttagctaaaaacac

SEQ ID NO: 302947 - DNA, 21 bp, Artificial sequence
  SiRNA target sequence
gttactttagctaaaaacaca

SEQ ID NO: 302948 - DNA, 21 bp, Artificial sequence
  SiRNA target sequence
ttactttagctaaaaacacac

SEQ ID NO: 302949 - DNA, 21 bp, Artificial sequence
  SiRNA target sequence
tactttagctaaaaacacaca

SEQ ID NO: 302950 - DNA, 21 bp, Artificial sequence
  SiRNA target sequence
actttagctaaaaacacacaa

SEQ ID NO: 302951 - DNA, 21 bp, Artificial sequence
  SiRNA target sequence
ctttagctaaaaacacacaac

SEQ ID NO: 302952 - DNA, 21 bp, Artificial sequence
  SiRNA target sequence
tttagctaaaaacacacaacg

SEQ ID NO: 302953 - DNA, 21 bp, Artificial sequence
  SiRNA target sequence
ttagctaaaaacacacaacga

SEQ ID NO: 302954 - DNA, 21 bp, Artificial sequence
  SiRNA target sequence
tagctaaaaacacacaacgaa

SEQ ID NO: 302955 - DNA, 21 bp, Artificial sequence
  SiRNA target sequence
agctaaaaacacacaacgaat

SEQ ID NO: 302956 - DNA, 21 bp, Artificial sequence
  SiRNA target sequence
gctaaaaacacacaacgaatg

SEQ ID NO: 302957 - DNA, 21 bp, Artificial sequence
  SiRNA target sequence
ctaaaaacacacaacgaatga

SEQ ID NO: 302958 - DNA, 21 bp, Artificial sequence
  SiRNA target sequence
taaaaacacacaacgaatgat

SEQ ID NO: 302959 - DNA, 21 bp, Artificial sequence
  SiRNA target sequence
aaaaacacacaacgaatgatt

SEQ ID NO: 302960 - DNA, 21 bp, Artificial sequence
  SiRNA target sequence
aaaacacacaacgaatgattg

SEQ ID NO: 302961 - DNA, 21 bp, Artificial sequence
  SiRNA target sequence
aaacacacaacgaatgattga

SEQ ID NO: 302962 - DNA, 21 bp, Artificial sequence
  SiRNA target sequence
aacacacaacgaatgattgaa

SEQ ID NO: 302963 - DNA, 21 bp, Artificial sequence
  SiRNA target sequence
acacacaacgaatgattgaag

SEQ ID NO: 302964 - DNA, 21 bp, Artificial sequence
  SiRNA target sequence
cacacaacgaatgattgaagc

SEQ ID NO: 302965 - DNA, 21 bp, Artificial sequence
  SiRNA target sequence
acacaacgaatgattgaagca

SEQ ID NO: 302966 - DNA, 21 bp, Artificial sequence
  SiRNA target sequence
cacaacgaatgattgaagcat

SEQ ID NO: 302967 - DNA, 21 bp, Artificial sequence
  SiRNA target sequence
acaacgaatgattgaagcatt

SEQ ID NO: 302968 - DNA, 21 bp, Artificial sequence
  SiRNA target sequence
caacgaatgattgaagcattt

SEQ ID NO: 302969 - DNA, 21 bp, Artificial sequence
  SiRNA target sequence
aacgaatgattgaagcatttg

SEQ ID NO: 302970 - DNA, 21 bp, Artificial sequence
  SiRNA target sequence
acgaatgattgaagcatttgc

SEQ ID NO: 302971 - DNA, 21 bp, Artificial sequence
  SiRNA target sequence
cgaatgattgaagcatttgca

SEQ ID NO: 302972 - DNA, 21 bp, Artificial sequence
  SiRNA target sequence
gaatgattgaagcatttgcaa

SEQ ID NO: 302973 - DNA, 21 bp, Artificial sequence
  SiRNA target sequence
aatgattgaagcatttgcaag

SEQ ID NO: 302974 - DNA, 21 bp, Artificial sequence
  SiRNA target sequence
atgattgaagcatttgcaagt

SEQ ID NO: 302975 - DNA, 21 bp, Artificial sequence
  SiRNA target sequence
tgattgaagcatttgcaagtt

SEQ ID NO: 302976 - DNA, 21 bp, Artificial sequence
  SiRNA target sequence
gattgaagcatttgcaagttc

SEQ ID NO: 302977 - DNA, 21 bp, Artificial sequence
  SiRNA target sequence
attgaagcatttgcaagttct

SEQ ID NO: 302978 - DNA, 21 bp, Artificial sequence
  SiRNA target sequence
ttgaagcatttgcaagttctg

SEQ ID NO: 302979 - DNA, 21 bp, Artificial sequence
  SiRNA target sequence
tgaagcatttgcaagttctga

SEQ ID NO: 302980 - DNA, 21 bp, Artificial sequence
  SiRNA target sequence
gaagcatttgcaagttctgat

SEQ ID NO: 302981 - DNA, 21 bp, Artificial sequence
  SiRNA target sequence
aagcatttgcaagttctgata

SEQ ID NO: 302982 - DNA, 21 bp, Artificial sequence
  SiRNA target sequence
agcatttgcaagttctgatac

SEQ ID NO: 302983 - DNA, 21 bp, Artificial sequence
  SiRNA target sequence
gcatttgcaagttctgatact

SEQ ID NO: 302984 - DNA, 21 bp, Artificial sequence
  SiRNA target sequence
catttgcaagttctgatactg

SEQ ID NO: 302985 - DNA, 21 bp, Artificial sequence
  SiRNA target sequence
atttgcaagttctgatactgt

SEQ ID NO: 302986 - DNA, 21 bp, Artificial sequence
  SiRNA target sequence
tttgcaagttctgatactgta

SEQ ID NO: 302987 - DNA, 21 bp, Artificial sequence
  SiRNA target sequence
ttgcaagttctgatactgtaa

SEQ ID NO: 302988 - DNA, 21 bp, Artificial sequence
  SiRNA target sequence
tgcaagttctgatactgtaac

SEQ ID NO: 302989 - DNA, 21 bp, Artificial sequence
  SiRNA target sequence
gcaagttctgatactgtaaca

SEQ ID NO: 302990 - DNA, 21 bp, Artificial sequence
  SiRNA target sequence
caagttctgatactgtaacac

SEQ ID NO: 302991 - DNA, 21 bp, Artificial sequence
  SiRNA target sequence
aagttctgatactgtaacact

SEQ ID NO: 302992 - DNA, 21 bp, Artificial sequence
  SiRNA target sequence
agttctgatactgtaacactg

SEQ ID NO: 302993 - DNA, 21 bp, Artificial sequence
  SiRNA target sequence
gttctgatactgtaacactga

SEQ ID NO: 302994 - DNA, 21 bp, Artificial sequence
  SiRNA target sequence
ttctgatactgtaacactgaa

SEQ ID NO: 302995 - DNA, 21 bp, Artificial sequence
  SiRNA target sequence
tctgatactgtaacactgaaa

SEQ ID NO: 302996 - DNA, 21 bp, Artificial sequence
  SiRNA target sequence
ctgatactgtaacactgaaaa

SEQ ID NO: 302997 - DNA, 21 bp, Artificial sequence
  SiRNA target sequence
tgatactgtaacactgaaaag

SEQ ID NO: 302998 - DNA, 21 bp, Artificial sequence
  SiRNA target sequence
gatactgtaacactgaaaaga

SEQ ID NO: 302999 - DNA, 21 bp, Artificial sequence
  SiRNA target sequence
atactgtaacactgaaaagac

SEQ ID NO: 303000 - DNA, 21 bp, Artificial sequence
  SiRNA target sequence
tactgtaacactgaaaagacc

SEQ ID NO: 303001 - DNA, 21 bp, Artificial sequence
  SiRNA target sequence
actgtaacactgaaaagacca

SEQ ID NO: 303002 - DNA, 21 bp, Artificial sequence
  SiRNA target sequence
ctgtaacactgaaaagaccaa

SEQ ID NO: 303003 - DNA, 21 bp, Artificial sequence
  SiRNA target sequence
tgtaacactgaaaagaccaac

SEQ ID NO: 303004 - DNA, 21 bp, Artificial sequence
  SiRNA target sequence
gtaacactgaaaagaccaaca

SEQ ID NO: 303005 - DNA, 21 bp, Artificial sequence
  SiRNA target sequence
taacactgaaaagaccaacaa

SEQ ID NO: 303006 - DNA, 21 bp, Artificial sequence
  SiRNA target sequence
aacactgaaaagaccaacaac

SEQ ID NO: 303007 - DNA, 21 bp, Artificial sequence
  SiRNA target sequence
acactgaaaagaccaacaaca

SEQ ID NO: 303008 - DNA, 21 bp, Artificial sequence
  SiRNA target sequence
cactgaaaagaccaacaacaa

SEQ ID NO: 303009 - DNA, 21 bp, Artificial sequence
  SiRNA target sequence
actgaaaagaccaacaacaaa

SEQ ID NO: 303010 - DNA, 21 bp, Artificial sequence
  SiRNA target sequence
ctgaaaagaccaacaacaaaa

SEQ ID NO: 303011 - DNA, 21 bp, Artificial sequence
  SiRNA target sequence
tgaaaagaccaacaacaaaat

SEQ ID NO: 303012 - DNA, 21 bp, Artificial sequence
  SiRNA target sequence
gaaaagaccaacaacaaaata

SEQ ID NO: 303013 - DNA, 21 bp, Artificial sequence
  SiRNA target sequence
aaaagaccaacaacaaaatat

SEQ ID NO: 303014 - DNA, 21 bp, Artificial sequence
  SiRNA target sequence
aaagaccaacaacaaaatatg

SEQ ID NO: 303015 - DNA, 21 bp, Artificial sequence
  SiRNA target sequence
aagaccaacaacaaaatatgt

SEQ ID NO: 303016 - DNA, 21 bp, Artificial sequence
  SiRNA target sequence
agaccaacaacaaaatatgtt

SEQ ID NO: 303017 - DNA, 21 bp, Artificial sequence
  SiRNA target sequence
gaccaacaacaaaatatgttg

SEQ ID NO: 303018 - DNA, 21 bp, Artificial sequence
  SiRNA target sequence
accaacaacaaaatatgttga

SEQ ID NO: 303019 - DNA, 21 bp, Artificial sequence
  SiRNA target sequence
ccaacaacaaaatatgttgaa

SEQ ID NO: 303020 - DNA, 21 bp, Artificial sequence
  SiRNA target sequence
caacaacaaaatatgttgaag

SEQ ID NO: 303021 - DNA, 21 bp, Artificial sequence
  SiRNA target sequence
aacaacaaaatatgttgaagg

SEQ ID NO: 303022 - DNA, 21 bp, Artificial sequence
  SiRNA target sequence
acaacaaaatatgttgaagga

SEQ ID NO: 303023 - DNA, 21 bp, Artificial sequence
  SiRNA target sequence
caacaaaatatgttgaaggaa

SEQ ID NO: 303024 - DNA, 21 bp, Artificial sequence
  SiRNA target sequence
aacaaaatatgttgaaggaac

SEQ ID NO: 303025 - DNA, 21 bp, Artificial sequence
  SiRNA target sequence
acaaaatatgttgaaggaact

SEQ ID NO: 303026 - DNA, 21 bp, Artificial sequence
  SiRNA target sequence
caaaatatgttgaaggaactg

SEQ ID NO: 303027 - DNA, 21 bp, Artificial sequence
  SiRNA target sequence
aaaatatgttgaaggaactgg

SEQ ID NO: 303028 - DNA, 21 bp, Artificial sequence
  SiRNA target sequence
aaatatgttgaaggaactgga

SEQ ID NO: 303029 - DNA, 21 bp, Artificial sequence
  SiRNA target sequence
aatatgttgaaggaactggat

SEQ ID NO: 303030 - DNA, 21 bp, Artificial sequence
  SiRNA target sequence
atatgttgaaggaactggata

SEQ ID NO: 303031 - DNA, 21 bp, Artificial sequence
  SiRNA target sequence
tatgttgaaggaactggatat

SEQ ID NO: 303032 - DNA, 21 bp, Artificial sequence
  SiRNA target sequence
atgttgaaggaactggatatg

SEQ ID NO: 303033 - DNA, 21 bp, Artificial sequence
  SiRNA target sequence
tgttgaaggaactggatatga

SEQ ID NO: 303034 - DNA, 21 bp, Artificial sequence
  SiRNA target sequence
gttgaaggaactggatatgat

SEQ ID NO: 303035 - DNA, 21 bp, Artificial sequence
  SiRNA target sequence
ttgaaggaactggatatgata

SEQ ID NO: 303036 - DNA, 21 bp, Artificial sequence
  SiRNA target sequence
tgaaggaactggatatgatac

SEQ ID NO: 303037 - DNA, 21 bp, Artificial sequence
  SiRNA target sequence
gaaggaactggatatgataca

SEQ ID NO: 303038 - DNA, 21 bp, Artificial sequence
  SiRNA target sequence
aaggaactggatatgatacag

SEQ ID NO: 303039 - DNA, 21 bp, Artificial sequence
  SiRNA target sequence
aggaactggatatgatacagt

SEQ ID NO: 303040 - DNA, 21 bp, Artificial sequence
  SiRNA target sequence
ggaactggatatgatacagtt

SEQ ID NO: 303041 - DNA, 21 bp, Artificial sequence
  SiRNA target sequence
gaactggatatgatacagttg

SEQ ID NO: 303042 - DNA, 21 bp, Artificial sequence
  SiRNA target sequence
aactggatatgatacagttga

SEQ ID NO: 303043 - DNA, 21 bp, Artificial sequence
  SiRNA target sequence
actggatatgatacagttgat

SEQ ID NO: 303044 - DNA, 21 bp, Artificial sequence
  SiRNA target sequence
ctggatatgatacagttgatg

SEQ ID NO: 303045 - DNA, 21 bp, Artificial sequence
  SiRNA target sequence
tggatatgatacagttgatgt

SEQ ID NO: 303046 - DNA, 21 bp, Artificial sequence
  SiRNA target sequence
ggatatgatacagttgatgtc

SEQ ID NO: 303047 - DNA, 21 bp, Artificial sequence
  SiRNA target sequence
gatatgatacagttgatgtct

SEQ ID NO: 303048 - DNA, 21 bp, Artificial sequence
  SiRNA target sequence
atatgatacagttgatgtctc

SEQ ID NO: 303049 - DNA, 21 bp, Artificial sequence
  SiRNA target sequence
tatgatacagttgatgtctct

SEQ ID NO: 303050 - DNA, 21 bp, Artificial sequence
  SiRNA target sequence
atgatacagttgatgtctcta

SEQ ID NO: 303051 - DNA, 21 bp, Artificial sequence
  SiRNA target sequence
tgatacagttgatgtctctat

SEQ ID NO: 303052 - DNA, 21 bp, Artificial sequence
  SiRNA target sequence
gatacagttgatgtctctatg

SEQ ID NO: 303053 - DNA, 21 bp, Artificial sequence
  SiRNA target sequence
atacagttgatgtctctatgc

SEQ ID NO: 303054 - DNA, 21 bp, Artificial sequence
  SiRNA target sequence
tacagttgatgtctctatgca

SEQ ID NO: 303055 - DNA, 21 bp, Artificial sequence
  SiRNA target sequence
acagttgatgtctctatgcaa

SEQ ID NO: 303056 - DNA, 21 bp, Artificial sequence
  SiRNA target sequence
cagttgatgtctctatgcaaa

SEQ ID NO: 303057 - DNA, 21 bp, Artificial sequence
  SiRNA target sequence
agttgatgtctctatgcaaat

SEQ ID NO: 303058 - DNA, 21 bp, Artificial sequence
  SiRNA target sequence
gttgatgtctctatgcaaatg

SEQ ID NO: 303059 - DNA, 21 bp, Artificial sequence
  SiRNA target sequence
ttgatgtctctatgcaaatgt

SEQ ID NO: 303060 - DNA, 21 bp, Artificial sequence
  SiRNA target sequence
tgatgtctctatgcaaatgtg

SEQ ID NO: 303061 - DNA, 21 bp, Artificial sequence
  SiRNA target sequence
gatgtctctatgcaaatgtgg

SEQ ID NO: 303062 - DNA, 21 bp, Artificial sequence
  SiRNA target sequence
atgtctctatgcaaatgtgga

SEQ ID NO: 303063 - DNA, 21 bp, Artificial sequence
  SiRNA target sequence
tgtctctatgcaaatgtggag

SEQ ID NO: 303064 - DNA, 21 bp, Artificial sequence
  SiRNA target sequence
gtctctatgcaaatgtggaga

SEQ ID NO: 303065 - DNA, 21 bp, Artificial sequence
  SiRNA target sequence
tctctatgcaaatgtggagag

SEQ ID NO: 303066 - DNA, 21 bp, Artificial sequence
  SiRNA target sequence
ctctatgcaaatgtggagaga

SEQ ID NO: 303067 - DNA, 21 bp, Artificial sequence
  SiRNA target sequence
tctatgcaaatgtggagagat

SEQ ID NO: 303068 - DNA, 21 bp, Artificial sequence
  SiRNA target sequence
ctatgcaaatgtggagagatc

SEQ ID NO: 303069 - DNA, 21 bp, Artificial sequence
  SiRNA target sequence
tatgcaaatgtggagagatca

SEQ ID NO: 303070 - DNA, 21 bp, Artificial sequence
  SiRNA target sequence
atgcaaatgtggagagatcag

SEQ ID NO: 303071 - DNA, 21 bp, Artificial sequence
  SiRNA target sequence
tgcaaatgtggagagatcagg

SEQ ID NO: 303072 - DNA, 21 bp, Artificial sequence
  SiRNA target sequence
gcaaatgtggagagatcaggt

SEQ ID NO: 303073 - DNA, 21 bp, Artificial sequence
  SiRNA target sequence
caaatgtggagagatcaggtg

SEQ ID NO: 303074 - DNA, 21 bp, Artificial sequence
  SiRNA target sequence
aaatgtggagagatcaggtgg

SEQ ID NO: 303075 - DNA, 21 bp, Artificial sequence
  SiRNA target sequence
aatgtggagagatcaggtggc

SEQ ID NO: 303076 - DNA, 21 bp, Artificial sequence
  SiRNA target sequence
atgtggagagatcaggtggcg

SEQ ID NO: 303077 - DNA, 21 bp, Artificial sequence
  SiRNA target sequence
tgtggagagatcaggtggcgc

SEQ ID NO: 303078 - DNA, 21 bp, Artificial sequence
  SiRNA target sequence
gtggagagatcaggtggcgca

SEQ ID NO: 303079 - DNA, 21 bp, Artificial sequence
  SiRNA target sequence
tggagagatcaggtggcgcag

SEQ ID NO: 303080 - DNA, 21 bp, Artificial sequence
  SiRNA target sequence
ggagagatcaggtggcgcaga

SEQ ID NO: 303081 - DNA, 21 bp, Artificial sequence
  SiRNA target sequence
gagagatcaggtggcgcagaa

SEQ ID NO: 303082 - DNA, 21 bp, Artificial sequence
  SiRNA target sequence
agagatcaggtggcgcagaaa

SEQ ID NO: 303083 - DNA, 21 bp, Artificial sequence
  SiRNA target sequence
gagatcaggtggcgcagaaat

SEQ ID NO: 303084 - DNA, 21 bp, Artificial sequence
  SiRNA target sequence
agatcaggtggcgcagaaatt

SEQ ID NO: 303085 - DNA, 21 bp, Artificial sequence
  SiRNA target sequence
gatcaggtggcgcagaaattg

SEQ ID NO: 303086 - DNA, 21 bp, Artificial sequence
  SiRNA target sequence
atcaggtggcgcagaaattga

SEQ ID NO: 303087 - DNA, 21 bp, Artificial sequence
  SiRNA target sequence
tcaggtggcgcagaaattgat

SEQ ID NO: 303088 - DNA, 21 bp, Artificial sequence
  SiRNA target sequence
caggtggcgcagaaattgatc

SEQ ID NO: 303089 - DNA, 21 bp, Artificial sequence
  SiRNA target sequence
aggtggcgcagaaattgatca

SEQ ID NO: 303090 - DNA, 21 bp, Artificial sequence
  SiRNA target sequence
ggtggcgcagaaattgatcac

SEQ ID NO: 303091 - DNA, 21 bp, Artificial sequence
  SiRNA target sequence
gtggcgcagaaattgatcact

SEQ ID NO: 303092 - DNA, 21 bp, Artificial sequence
  SiRNA target sequence
tggcgcagaaattgatcacta

SEQ ID NO: 303093 - DNA, 21 bp, Artificial sequence
  SiRNA target sequence
ggcgcagaaattgatcactaa

SEQ ID NO: 303094 - DNA, 21 bp, Artificial sequence
  SiRNA target sequence
gcgcagaaattgatcactaac

SEQ ID NO: 303095 - DNA, 21 bp, Artificial sequence
  SiRNA target sequence
cgcagaaattgatcactaacc

SEQ ID NO: 303096 - DNA, 21 bp, Artificial sequence
  SiRNA target sequence
gcagaaattgatcactaaccg

SEQ ID NO: 303097 - DNA, 21 bp, Artificial sequence
  SiRNA target sequence
cagaaattgatcactaaccga

SEQ ID NO: 303098 - DNA, 21 bp, Artificial sequence
  SiRNA target sequence
agaaattgatcactaaccgaa

SEQ ID NO: 303099 - DNA, 21 bp, Artificial sequence
  SiRNA target sequence
gaaattgatcactaaccgaat

SEQ ID NO: 303100 - DNA, 21 bp, Artificial sequence
  SiRNA target sequence
aaattgatcactaaccgaatt

SEQ ID NO: 303101 - DNA, 21 bp, Artificial sequence
  SiRNA target sequence
aattgatcactaaccgaattt

SEQ ID NO: 303102 - DNA, 21 bp, Artificial sequence
  SiRNA target sequence
attgatcactaaccgaatttt

SEQ ID NO: 303103 - DNA, 21 bp, Artificial sequence
  SiRNA target sequence
ttgatcactaaccgaatttta

SEQ ID NO: 303104 - DNA, 21 bp, Artificial sequence
  SiRNA target sequence
tgatcactaaccgaattttaa

SEQ ID NO: 303105 - DNA, 21 bp, Artificial sequence
  SiRNA target sequence
gatcactaaccgaattttaac

SEQ ID NO: 303106 - DNA, 21 bp, Artificial sequence
  SiRNA target sequence
atcactaaccgaattttaaca

SEQ ID NO: 303107 - DNA, 21 bp, Artificial sequence
  SiRNA target sequence
tcactaaccgaattttaacaa

SEQ ID NO: 303108 - DNA, 21 bp, Artificial sequence
  SiRNA target sequence
cactaaccgaattttaacaaa

SEQ ID NO: 303109 - DNA, 21 bp, Artificial sequence
  SiRNA target sequence
actaaccgaattttaacaaat

SEQ ID NO: 303110 - DNA, 21 bp, Artificial sequence
  SiRNA target sequence
ctaaccgaattttaacaaatc

SEQ ID NO: 303111 - DNA, 21 bp, Artificial sequence
  SiRNA target sequence
taaccgaattttaacaaatct

SEQ ID NO: 303112 - DNA, 21 bp, Artificial sequence
  SiRNA target sequence
aaccgaattttaacaaatctg

SEQ ID NO: 303113 - DNA, 21 bp, Artificial sequence
  SiRNA target sequence
accgaattttaacaaatctgt

SEQ ID NO: 303114 - DNA, 21 bp, Artificial sequence
  SiRNA target sequence
ccgaattttaacaaatctgta

SEQ ID NO: 303115 - DNA, 21 bp, Artificial sequence
  SiRNA target sequence
cgaattttaacaaatctgtat

SEQ ID NO: 303116 - DNA, 21 bp, Artificial sequence
  SiRNA target sequence
gaattttaacaaatctgtata

SEQ ID NO: 303117 - DNA, 21 bp, Artificial sequence
  SiRNA target sequence
aattttaacaaatctgtataa

SEQ ID NO: 303118 - DNA, 21 bp, Artificial sequence
  SiRNA target sequence
attttaacaaatctgtataaa

SEQ ID NO: 303119 - DNA, 21 bp, Artificial sequence
  SiRNA target sequence
ttttaacaaatctgtataaaa

SEQ ID NO: 303120 - DNA, 21 bp, Artificial sequence
  SiRNA target sequence
tttaacaaatctgtataaaat

SEQ ID NO: 303121 - DNA, 21 bp, Artificial sequence
  SiRNA target sequence
ttaacaaatctgtataaaatt

SEQ ID NO: 303122 - DNA, 21 bp, Artificial sequence
  SiRNA target sequence
taacaaatctgtataaaattt

SEQ ID NO: 303123 - DNA, 21 bp, Artificial sequence
  SiRNA target sequence
aacaaatctgtataaaatttg

SEQ ID NO: 303124 - DNA, 21 bp, Artificial sequence
  SiRNA target sequence
acaaatctgtataaaatttgt

SEQ ID NO: 303125 - DNA, 21 bp, Artificial sequence
  SiRNA target sequence
caaatctgtataaaatttgtt

SEQ ID NO: 303126 - DNA, 21 bp, Artificial sequence
  SiRNA target sequence
aaatctgtataaaatttgttt

SEQ ID NO: 303127 - DNA, 21 bp, Artificial sequence
  SiRNA target sequence
aatctgtataaaatttgttta

SEQ ID NO: 303128 - DNA, 21 bp, Artificial sequence
  SiRNA target sequence
atctgtataaaatttgtttag

SEQ ID NO: 303129 - DNA, 21 bp, Artificial sequence
  SiRNA target sequence
tctgtataaaatttgtttagt

SEQ ID NO: 303130 - DNA, 21 bp, Artificial sequence
  SiRNA target sequence
ctgtataaaatttgtttagta

SEQ ID NO: 303131 - DNA, 21 bp, Artificial sequence
  SiRNA target sequence
tgtataaaatttgtttagtaa

SEQ ID NO: 303132 - DNA, 21 bp, Artificial sequence
  SiRNA target sequence
gtataaaatttgtttagtaaa

SEQ ID NO: 303133 - DNA, 21 bp, Artificial sequence
  SiRNA target sequence
tataaaatttgtttagtaaat

SEQ ID NO: 303134 - DNA, 21 bp, Artificial sequence
  SiRNA target sequence
ataaaatttgtttagtaaatg

SEQ ID NO: 303135 - DNA, 21 bp, Artificial sequence
  SiRNA target sequence
taaaatttgtttagtaaatga

SEQ ID NO: 303136 - DNA, 21 bp, Artificial sequence
  SiRNA target sequence
aaaatttgtttagtaaatgac

SEQ ID NO: 303137 - DNA, 21 bp, Artificial sequence
  SiRNA target sequence
aaatttgtttagtaaatgacg

SEQ ID NO: 303138 - DNA, 21 bp, Artificial sequence
  SiRNA target sequence
aatttgtttagtaaatgacga

SEQ ID NO: 303139 - DNA, 21 bp, Artificial sequence
  SiRNA target sequence
atttgtttagtaaatgacgac

SEQ ID NO: 303140 - DNA, 21 bp, Artificial sequence
  SiRNA target sequence
tttgtttagtaaatgacgacg

SEQ ID NO: 303141 - DNA, 21 bp, Artificial sequence
  SiRNA target sequence
ttgtttagtaaatgacgacga

SEQ ID NO: 303142 - DNA, 21 bp, Artificial sequence
  SiRNA target sequence
tgtttagtaaatgacgacgac

SEQ ID NO: 303143 - DNA, 21 bp, Artificial sequence
  SiRNA target sequence
gtttagtaaatgacgacgaca

SEQ ID NO: 303144 - DNA, 21 bp, Artificial sequence
  SiRNA target sequence
tttagtaaatgacgacgacac

SEQ ID NO: 303145 - DNA, 21 bp, Artificial sequence
  SiRNA target sequence
ttagtaaatgacgacgacaca

SEQ ID NO: 303146 - DNA, 21 bp, Artificial sequence
  SiRNA target sequence
tagtaaatgacgacgacacag

SEQ ID NO: 303147 - DNA, 21 bp, Artificial sequence
  SiRNA target sequence
agtaaatgacgacgacacagt

SEQ ID NO: 303148 - DNA, 21 bp, Artificial sequence
  SiRNA target sequence
gtaaatgacgacgacacagta

SEQ ID NO: 303149 - DNA, 21 bp, Artificial sequence
  SiRNA target sequence
taaatgacgacgacacagtaa

SEQ ID NO: 303150 - DNA, 21 bp, Artificial sequence
  SiRNA target sequence
aaatgacgacgacacagtaac

SEQ ID NO: 303151 - DNA, 21 bp, Artificial sequence
  SiRNA target sequence
aatgacgacgacacagtaaca

SEQ ID NO: 303152 - DNA, 21 bp, Artificial sequence
  SiRNA target sequence
atgacgacgacacagtaacac

SEQ ID NO: 303153 - DNA, 21 bp, Artificial sequence
  SiRNA target sequence
tgacgacgacacagtaacacc

SEQ ID NO: 303154 - DNA, 21 bp, Artificial sequence
  SiRNA target sequence
gacgacgacacagtaacacca

SEQ ID NO: 303155 - DNA, 21 bp, Artificial sequence
  SiRNA target sequence
acgacgacacagtaacaccac

SEQ ID NO: 303156 - DNA, 21 bp, Artificial sequence
  SiRNA target sequence
cgacgacacagtaacaccact

SEQ ID NO: 303157 - DNA, 21 bp, Artificial sequence
  SiRNA target sequence
gacgacacagtaacaccactt

SEQ ID NO: 303158 - DNA, 21 bp, Artificial sequence
  SiRNA target sequence
acgacacagtaacaccacttt

SEQ ID NO: 303159 - DNA, 21 bp, Artificial sequence
  SiRNA target sequence
cgacacagtaacaccactttt

SEQ ID NO: 303160 - DNA, 21 bp, Artificial sequence
  SiRNA target sequence
gacacagtaacaccacttttg

SEQ ID NO: 303161 - DNA, 21 bp, Artificial sequence
  SiRNA target sequence
acacagtaacaccacttttga

SEQ ID NO: 303162 - DNA, 21 bp, Artificial sequence
  SiRNA target sequence
cacagtaacaccacttttgaa

SEQ ID NO: 303163 - DNA, 21 bp, Artificial sequence
  SiRNA target sequence
acagtaacaccacttttgaac

SEQ ID NO: 303164 - DNA, 21 bp, Artificial sequence
  SiRNA target sequence
cagtaacaccacttttgaacg

SEQ ID NO: 303165 - DNA, 21 bp, Artificial sequence
  SiRNA target sequence
agtaacaccacttttgaacgg

SEQ ID NO: 303166 - DNA, 21 bp, Artificial sequence
  SiRNA target sequence
gtaacaccacttttgaacgga

SEQ ID NO: 303167 - DNA, 21 bp, Artificial sequence
  SiRNA target sequence
taacaccacttttgaacggat

SEQ ID NO: 303168 - DNA, 21 bp, Artificial sequence
  SiRNA target sequence
aacaccacttttgaacggatt

SEQ ID NO: 303169 - DNA, 21 bp, Artificial sequence
  SiRNA target sequence
acaccacttttgaacggatta

SEQ ID NO: 303170 - DNA, 21 bp, Artificial sequence
  SiRNA target sequence
caccacttttgaacggattat

SEQ ID NO: 303171 - DNA, 21 bp, Artificial sequence
  SiRNA target sequence
accacttttgaacggattatt

SEQ ID NO: 303172 - DNA, 21 bp, Artificial sequence
  SiRNA target sequence
ccacttttgaacggattattt

SEQ ID NO: 303173 - DNA, 21 bp, Artificial sequence
  SiRNA target sequence
cacttttgaacggattattta

SEQ ID NO: 303174 - DNA, 21 bp, Artificial sequence
  SiRNA target sequence
acttttgaacggattatttat

SEQ ID NO: 303175 - DNA, 21 bp, Artificial sequence
  SiRNA target sequence
cttttgaacggattatttatt

SEQ ID NO: 303176 - DNA, 21 bp, Artificial sequence
  SiRNA target sequence
ttttgaacggattatttattc

SEQ ID NO: 303177 - DNA, 21 bp, Artificial sequence
  SiRNA target sequence
tttgaacggattatttattcg

SEQ ID NO: 303178 - DNA, 21 bp, Artificial sequence
  SiRNA target sequence
ttgaacggattatttattcgt

SEQ ID NO: 303179 - DNA, 21 bp, Artificial sequence
  SiRNA target sequence
tgaacggattatttattcgtt

SEQ ID NO: 303180 - DNA, 21 bp, Artificial sequence
  SiRNA target sequence
gaacggattatttattcgttc

SEQ ID NO: 303181 - DNA, 21 bp, Artificial sequence
  SiRNA target sequence
aacggattatttattcgttca

SEQ ID NO: 303182 - DNA, 21 bp, Artificial sequence
  SiRNA target sequence
acggattatttattcgttcaa

SEQ ID NO: 303183 - DNA, 21 bp, Artificial sequence
  SiRNA target sequence
cggattatttattcgttcaaa

SEQ ID NO: 303184 - DNA, 21 bp, Artificial sequence
  SiRNA target sequence
ggattatttattcgttcaaat

SEQ ID NO: 303185 - DNA, 21 bp, Artificial sequence
  SiRNA target sequence
gattatttattcgttcaaatg

SEQ ID NO: 303186 - DNA, 21 bp, Artificial sequence
  SiRNA target sequence
attatttattcgttcaaatgt

SEQ ID NO: 303187 - DNA, 21 bp, Artificial sequence
  SiRNA target sequence
ttatttattcgttcaaatgtg

SEQ ID NO: 303188 - DNA, 21 bp, Artificial sequence
  SiRNA target sequence
tatttattcgttcaaatgtga

SEQ ID NO: 303189 - DNA, 21 bp, Artificial sequence
  SiRNA target sequence
atttattcgttcaaatgtgat

SEQ ID NO: 303190 - DNA, 21 bp, Artificial sequence
  SiRNA target sequence
tttattcgttcaaatgtgatg

SEQ ID NO: 303191 - DNA, 21 bp, Artificial sequence
  SiRNA target sequence
ttattcgttcaaatgtgatgt

SEQ ID NO: 303192 - DNA, 21 bp, Artificial sequence
  SiRNA target sequence
tattcgttcaaatgtgatgtt

SEQ ID NO: 303193 - DNA, 21 bp, Artificial sequence
  SiRNA target sequence
attcgttcaaatgtgatgtta

SEQ ID NO: 303194 - DNA, 21 bp, Artificial sequence
  SiRNA target sequence
ttcgttcaaatgtgatgttag

SEQ ID NO: 303195 - DNA, 21 bp, Artificial sequence
  SiRNA target sequence
tcgttcaaatgtgatgttagt

SEQ ID NO: 303196 - DNA, 21 bp, Artificial sequence
  SiRNA target sequence
cgttcaaatgtgatgttagta

SEQ ID NO: 303197 - DNA, 21 bp, Artificial sequence
  SiRNA target sequence
gttcaaatgtgatgttagtac

SEQ ID NO: 303198 - DNA, 21 bp, Artificial sequence
  SiRNA target sequence
ttcaaatgtgatgttagtacc

SEQ ID NO: 303199 - DNA, 21 bp, Artificial sequence
  SiRNA target sequence
tcaaatgtgatgttagtaccc

SEQ ID NO: 303200 - DNA, 21 bp, Artificial sequence
  SiRNA target sequence
caaatgtgatgttagtacccg

SEQ ID NO: 303201 - DNA, 21 bp, Artificial sequence
  SiRNA target sequence
aaatgtgatgttagtacccgg

SEQ ID NO: 303202 - DNA, 21 bp, Artificial sequence
  SiRNA target sequence
aatgtgatgttagtacccgga

SEQ ID NO: 303203 - DNA, 21 bp, Artificial sequence
  SiRNA target sequence
atgtgatgttagtacccggac

SEQ ID NO: 303204 - DNA, 21 bp, Artificial sequence
  SiRNA target sequence
tgtgatgttagtacccggaca

SEQ ID NO: 303205 - DNA, 21 bp, Artificial sequence
  SiRNA target sequence
gtgatgttagtacccggacat

SEQ ID NO: 303206 - DNA, 21 bp, Artificial sequence
  SiRNA target sequence
tgatgttagtacccggacatt

SEQ ID NO: 303207 - DNA, 21 bp, Artificial sequence
  SiRNA target sequence
gatgttagtacccggacattt

SEQ ID NO: 303208 - DNA, 21 bp, Artificial sequence
  SiRNA target sequence
atgttagtacccggacatttg

SEQ ID NO: 303209 - DNA, 21 bp, Artificial sequence
  SiRNA target sequence
tgttagtacccggacatttga

SEQ ID NO: 303210 - DNA, 21 bp, Artificial sequence
  SiRNA target sequence
gttagtacccggacatttgac

SEQ ID NO: 303211 - DNA, 21 bp, Artificial sequence
  SiRNA target sequence
ttagtacccggacatttgact

SEQ ID NO: 303212 - DNA, 21 bp, Artificial sequence
  SiRNA target sequence
tagtacccggacatttgactg

SEQ ID NO: 303213 - DNA, 21 bp, Artificial sequence
  SiRNA target sequence
agtacccggacatttgactgg

SEQ ID NO: 303214 - DNA, 21 bp, Artificial sequence
  SiRNA target sequence
gtacccggacatttgactgga

SEQ ID NO: 303215 - DNA, 21 bp, Artificial sequence
  SiRNA target sequence
tacccggacatttgactggat

SEQ ID NO: 303216 - DNA, 21 bp, Artificial sequence
  SiRNA target sequence
acccggacatttgactggatt

SEQ ID NO: 303217 - DNA, 21 bp, Artificial sequence
  SiRNA target sequence
cccggacatttgactggattc

SEQ ID NO: 303218 - DNA, 21 bp, Artificial sequence
  SiRNA target sequence
ccggacatttgactggattca

SEQ ID NO: 303219 - DNA, 21 bp, Artificial sequence
  SiRNA target sequence
cggacatttgactggattcat

SEQ ID NO: 303220 - DNA, 21 bp, Artificial sequence
  SiRNA target sequence
ggacatttgactggattcatt

SEQ ID NO: 303221 - DNA, 21 bp, Artificial sequence
  SiRNA target sequence
gacatttgactggattcattg

SEQ ID NO: 303222 - DNA, 21 bp, Artificial sequence
  SiRNA target sequence
acatttgactggattcattgc

SEQ ID NO: 303223 - DNA, 21 bp, Artificial sequence
  SiRNA target sequence
catttgactggattcattgca

SEQ ID NO: 303224 - DNA, 21 bp, Artificial sequence
  SiRNA target sequence
atttgactggattcattgcag

SEQ ID NO: 303225 - DNA, 21 bp, Artificial sequence
  SiRNA target sequence
tttgactggattcattgcaga

SEQ ID NO: 303226 - DNA, 21 bp, Artificial sequence
  SiRNA target sequence
ttgactggattcattgcagag

SEQ ID NO: 303227 - DNA, 21 bp, Artificial sequence
  SiRNA target sequence
tgactggattcattgcagagc

SEQ ID NO: 303228 - DNA, 21 bp, Artificial sequence
  SiRNA target sequence
gactggattcattgcagagca

SEQ ID NO: 303229 - DNA, 21 bp, Artificial sequence
  SiRNA target sequence
actggattcattgcagagcat

SEQ ID NO: 303230 - DNA, 21 bp, Artificial sequence
  SiRNA target sequence
ctggattcattgcagagcatg

SEQ ID NO: 303231 - DNA, 21 bp, Artificial sequence
  SiRNA target sequence
tggattcattgcagagcatga

SEQ ID NO: 303232 - DNA, 21 bp, Artificial sequence
  SiRNA target sequence
ggattcattgcagagcatgat

SEQ ID NO: 303233 - DNA, 21 bp, Artificial sequence
  SiRNA target sequence
gattcattgcagagcatgata

SEQ ID NO: 303234 - DNA, 21 bp, Artificial sequence
  SiRNA target sequence
attcattgcagagcatgatac

SEQ ID NO: 303235 - DNA, 21 bp, Artificial sequence
  SiRNA target sequence
ttcattgcagagcatgataca

SEQ ID NO: 303236 - DNA, 21 bp, Artificial sequence
  SiRNA target sequence
tcattgcagagcatgatacaa

SEQ ID NO: 303237 - DNA, 21 bp, Artificial sequence
  SiRNA target sequence
cattgcagagcatgatacaat

SEQ ID NO: 303238 - DNA, 21 bp, Artificial sequence
  SiRNA target sequence
attgcagagcatgatacaatt

SEQ ID NO: 303239 - DNA, 21 bp, Artificial sequence
  SiRNA target sequence
ttgcagagcatgatacaattg

SEQ ID NO: 303240 - DNA, 21 bp, Artificial sequence
  SiRNA target sequence
tgcagagcatgatacaattga

SEQ ID NO: 303241 - DNA, 21 bp, Artificial sequence
  SiRNA target sequence
gcagagcatgatacaattgaa

SEQ ID NO: 303242 - DNA, 21 bp, Artificial sequence
  SiRNA target sequence
cagagcatgatacaattgaaa

SEQ ID NO: 303243 - DNA, 21 bp, Artificial sequence
  SiRNA target sequence
agagcatgatacaattgaaat

SEQ ID NO: 303244 - DNA, 21 bp, Artificial sequence
  SiRNA target sequence
gagcatgatacaattgaaatc

SEQ ID NO: 303245 - DNA, 21 bp, Artificial sequence
  SiRNA target sequence
agcatgatacaattgaaatca

SEQ ID NO: 303246 - DNA, 21 bp, Artificial sequence
  SiRNA target sequence
gcatgatacaattgaaatcag

SEQ ID NO: 303247 - DNA, 21 bp, Artificial sequence
  SiRNA target sequence
catgatacaattgaaatcaga

SEQ ID NO: 303248 - DNA, 21 bp, Artificial sequence
  SiRNA target sequence
atgatacaattgaaatcagaa

SEQ ID NO: 303249 - DNA, 21 bp, Artificial sequence
  SiRNA target sequence
tgatacaattgaaatcagaaa

SEQ ID NO: 303250 - DNA, 21 bp, Artificial sequence
  SiRNA target sequence
gatacaattgaaatcagaaat

SEQ ID NO: 303251 - DNA, 21 bp, Artificial sequence
  SiRNA target sequence
atacaattgaaatcagaaatc

SEQ ID NO: 303252 - DNA, 21 bp, Artificial sequence
  SiRNA target sequence
tacaattgaaatcagaaatct

SEQ ID NO: 303253 - DNA, 21 bp, Artificial sequence
  SiRNA target sequence
acaattgaaatcagaaatctt

SEQ ID NO: 303254 - DNA, 21 bp, Artificial sequence
  SiRNA target sequence
caattgaaatcagaaatcttt

SEQ ID NO: 303255 - DNA, 21 bp, Artificial sequence
  SiRNA target sequence
aattgaaatcagaaatctttt

SEQ ID NO: 303256 - DNA, 21 bp, Artificial sequence
  SiRNA target sequence
attgaaatcagaaatcttttt

SEQ ID NO: 303257 - DNA, 21 bp, Artificial sequence
  SiRNA target sequence
ttgaaatcagaaatctttttg

SEQ ID NO: 303258 - DNA, 21 bp, Artificial sequence
  SiRNA target sequence
tgaaatcagaaatctttttga

SEQ ID NO: 303259 - DNA, 21 bp, Artificial sequence
  SiRNA target sequence
gaaatcagaaatctttttgat

SEQ ID NO: 303260 - DNA, 21 bp, Artificial sequence
  SiRNA target sequence
aaatcagaaatctttttgatg

SEQ ID NO: 303261 - DNA, 21 bp, Artificial sequence
  SiRNA target sequence
aatcagaaatctttttgatgt

SEQ ID NO: 303262 - DNA, 21 bp, Artificial sequence
  SiRNA target sequence
atcagaaatctttttgatgtg

SEQ ID NO: 303263 - DNA, 21 bp, Artificial sequence
  SiRNA target sequence
tcagaaatctttttgatgtgg

SEQ ID NO: 303264 - DNA, 21 bp, Artificial sequence
  SiRNA target sequence
cagaaatctttttgatgtggt

SEQ ID NO: 303265 - DNA, 21 bp, Artificial sequence
  SiRNA target sequence
agaaatctttttgatgtggta

SEQ ID NO: 303266 - DNA, 21 bp, Artificial sequence
  SiRNA target sequence
gaaatctttttgatgtggtat

SEQ ID NO: 303267 - DNA, 21 bp, Artificial sequence
  SiRNA target sequence
aaatctttttgatgtggtatt

SEQ ID NO: 303268 - DNA, 21 bp, Artificial sequence
  SiRNA target sequence
aatctttttgatgtggtattt

SEQ ID NO: 303269 - DNA, 21 bp, Artificial sequence
  SiRNA target sequence
atctttttgatgtggtattta

SEQ ID NO: 303270 - DNA, 21 bp, Artificial sequence
  SiRNA target sequence
tctttttgatgtggtatttag

SEQ ID NO: 303271 - DNA, 21 bp, Artificial sequence
  SiRNA target sequence
ctttttgatgtggtatttaga

SEQ ID NO: 303272 - DNA, 21 bp, Artificial sequence
  SiRNA target sequence
tttttgatgtggtatttagag

SEQ ID NO: 303273 - DNA, 21 bp, Artificial sequence
  SiRNA target sequence
ttttgatgtggtatttagagt

SEQ ID NO: 303274 - DNA, 21 bp, Artificial sequence
  SiRNA target sequence
tttgatgtggtatttagagta

SEQ ID NO: 303275 - DNA, 21 bp, Artificial sequence
  SiRNA target sequence
ttgatgtggtatttagagtac

SEQ ID NO: 303276 - DNA, 21 bp, Artificial sequence
  SiRNA target sequence
tgatgtggtatttagagtacc

SEQ ID NO: 303277 - DNA, 21 bp, Artificial sequence
  SiRNA target sequence
gatgtggtatttagagtacca

SEQ ID NO: 303278 - DNA, 21 bp, Artificial sequence
  SiRNA target sequence
atgtggtatttagagtaccat

SEQ ID NO: 303279 - DNA, 21 bp, Artificial sequence
  SiRNA target sequence
tgtggtatttagagtaccatg

SEQ ID NO: 303280 - DNA, 21 bp, Artificial sequence
  SiRNA target sequence
gtggtatttagagtaccatgg

SEQ ID NO: 303281 - DNA, 21 bp, Artificial sequence
  SiRNA target sequence
tggtatttagagtaccatgga

SEQ ID NO: 303282 - DNA, 21 bp, Artificial sequence
  SiRNA target sequence
ggtatttagagtaccatggaa

SEQ ID NO: 303283 - DNA, 21 bp, Artificial sequence
  SiRNA target sequence
gtatttagagtaccatggaaa

SEQ ID NO: 303284 - DNA, 21 bp, Artificial sequence
  SiRNA target sequence
tatttagagtaccatggaaag

SEQ ID NO: 303285 - DNA, 21 bp, Artificial sequence
  SiRNA target sequence
atttagagtaccatggaaaga

SEQ ID NO: 303286 - DNA, 21 bp, Artificial sequence
  SiRNA target sequence
tttagagtaccatggaaagaa

SEQ ID NO: 303287 - DNA, 21 bp, Artificial sequence
  SiRNA target sequence
ttagagtaccatggaaagaag

SEQ ID NO: 303288 - DNA, 21 bp, Artificial sequence
  SiRNA target sequence
tagagtaccatggaaagaagt

SEQ ID NO: 303289 - DNA, 21 bp, Artificial sequence
  SiRNA target sequence
agagtaccatggaaagaagtt

SEQ ID NO: 303290 - DNA, 21 bp, Artificial sequence
  SiRNA target sequence
gagtaccatggaaagaagtta

SEQ ID NO: 303291 - DNA, 21 bp, Artificial sequence
  SiRNA target sequence
agtaccatggaaagaagttaa

SEQ ID NO: 303292 - DNA, 21 bp, Artificial sequence
  SiRNA target sequence
gtaccatggaaagaagttaag

SEQ ID NO: 303293 - DNA, 21 bp, Artificial sequence
  SiRNA target sequence
taccatggaaagaagttaaga

SEQ ID NO: 303294 - DNA, 21 bp, Artificial sequence
  SiRNA target sequence
accatggaaagaagttaagaa

SEQ ID NO: 303295 - DNA, 21 bp, Artificial sequence
  SiRNA target sequence
ccatggaaagaagttaagaag

SEQ ID NO: 303296 - DNA, 21 bp, Artificial sequence
  SiRNA target sequence
catggaaagaagttaagaaga

SEQ ID NO: 303297 - DNA, 21 bp, Artificial sequence
  SiRNA target sequence
atggaaagaagttaagaagat

SEQ ID NO: 303298 - DNA, 21 bp, Artificial sequence
  SiRNA target sequence
tggaaagaagttaagaagata

SEQ ID NO: 303299 - DNA, 21 bp, Artificial sequence
  SiRNA target sequence
ggaaagaagttaagaagataa

SEQ ID NO: 303300 - DNA, 21 bp, Artificial sequence
  SiRNA target sequence
gaaagaagttaagaagataac

SEQ ID NO: 303301 - DNA, 21 bp, Artificial sequence
  SiRNA target sequence
aaagaagttaagaagataaca

SEQ ID NO: 303302 - DNA, 21 bp, Artificial sequence
  SiRNA target sequence
aagaagttaagaagataacag

SEQ ID NO: 303303 - DNA, 21 bp, Artificial sequence
  SiRNA target sequence
agaagttaagaagataacagt

SEQ ID NO: 303304 - DNA, 21 bp, Artificial sequence
  SiRNA target sequence
gaagttaagaagataacagtt

SEQ ID NO: 303305 - DNA, 21 bp, Artificial sequence
  SiRNA target sequence
aagttaagaagataacagttg

SEQ ID NO: 303306 - DNA, 21 bp, Artificial sequence
  SiRNA target sequence
agttaagaagataacagttga

SEQ ID NO: 303307 - DNA, 21 bp, Artificial sequence
  SiRNA target sequence
gttaagaagataacagttgag

SEQ ID NO: 303308 - DNA, 21 bp, Artificial sequence
  SiRNA target sequence
ttaagaagataacagttgaga

SEQ ID NO: 303309 - DNA, 21 bp, Artificial sequence
  SiRNA target sequence
taagaagataacagttgagaa

SEQ ID NO: 303310 - DNA, 21 bp, Artificial sequence
  SiRNA target sequence
aagaagataacagttgagaat

SEQ ID NO: 303311 - DNA, 21 bp, Artificial sequence
  SiRNA target sequence
agaagataacagttgagaatg

SEQ ID NO: 303312 - DNA, 21 bp, Artificial sequence
  SiRNA target sequence
gaagataacagttgagaatgc

SEQ ID NO: 303313 - DNA, 21 bp, Artificial sequence
  SiRNA target sequence
aagataacagttgagaatgct

SEQ ID NO: 303314 - DNA, 21 bp, Artificial sequence
  SiRNA target sequence
agataacagttgagaatgctc

SEQ ID NO: 303315 - DNA, 21 bp, Artificial sequence
  SiRNA target sequence
gataacagttgagaatgctct

SEQ ID NO: 303316 - DNA, 21 bp, Artificial sequence
  SiRNA target sequence
ataacagttgagaatgctctt

SEQ ID NO: 303317 - DNA, 21 bp, Artificial sequence
  SiRNA target sequence
taacagttgagaatgctcttg

SEQ ID NO: 303318 - DNA, 21 bp, Artificial sequence
  SiRNA target sequence
aacagttgagaatgctcttgg

SEQ ID NO: 303319 - DNA, 21 bp, Artificial sequence
  SiRNA target sequence
acagttgagaatgctcttggt

SEQ ID NO: 303320 - DNA, 21 bp, Artificial sequence
  SiRNA target sequence
cagttgagaatgctcttggtg

SEQ ID NO: 303321 - DNA, 21 bp, Artificial sequence
  SiRNA target sequence
agttgagaatgctcttggtga

SEQ ID NO: 303322 - DNA, 21 bp, Artificial sequence
  SiRNA target sequence
gttgagaatgctcttggtgaa

SEQ ID NO: 303323 - DNA, 21 bp, Artificial sequence
  SiRNA target sequence
ttgagaatgctcttggtgaat

SEQ ID NO: 303324 - DNA, 21 bp, Artificial sequence
  SiRNA target sequence
tgagaatgctcttggtgaatc

SEQ ID NO: 303325 - DNA, 21 bp, Artificial sequence
  SiRNA target sequence
gagaatgctcttggtgaatcc

SEQ ID NO: 303326 - DNA, 21 bp, Artificial sequence
  SiRNA target sequence
agaatgctcttggtgaatcca

SEQ ID NO: 303327 - DNA, 21 bp, Artificial sequence
  SiRNA target sequence
gaatgctcttggtgaatccaa

SEQ ID NO: 303328 - DNA, 21 bp, Artificial sequence
  SiRNA target sequence
aatgctcttggtgaatccaag

SEQ ID NO: 303329 - DNA, 21 bp, Artificial sequence
  SiRNA target sequence
atgctcttggtgaatccaagg

SEQ ID NO: 303330 - DNA, 21 bp, Artificial sequence
  SiRNA target sequence
tgctcttggtgaatccaagga

SEQ ID NO: 303331 - DNA, 21 bp, Artificial sequence
  SiRNA target sequence
gctcttggtgaatccaaggaa

SEQ ID NO: 303332 - DNA, 21 bp, Artificial sequence
  SiRNA target sequence
ctcttggtgaatccaaggaag

SEQ ID NO: 303333 - DNA, 21 bp, Artificial sequence
  SiRNA target sequence
tcttggtgaatccaaggaagc

SEQ ID NO: 303334 - DNA, 21 bp, Artificial sequence
  SiRNA target sequence
cttggtgaatccaaggaagca

SEQ ID NO: 303335 - DNA, 21 bp, Artificial sequence
  SiRNA target sequence
ttggtgaatccaaggaagcag

SEQ ID NO: 303336 - DNA, 21 bp, Artificial sequence
  SiRNA target sequence
tggtgaatccaaggaagcagc

SEQ ID NO: 303337 - DNA, 21 bp, Artificial sequence
  SiRNA target sequence
ggtgaatccaaggaagcagcg

SEQ ID NO: 303338 - DNA, 21 bp, Artificial sequence
  SiRNA target sequence
gtgaatccaaggaagcagcgt

SEQ ID NO: 303339 - DNA, 21 bp, Artificial sequence
  SiRNA target sequence
tgaatccaaggaagcagcgtt

SEQ ID NO: 303340 - DNA, 21 bp, Artificial sequence
  SiRNA target sequence
gaatccaaggaagcagcgtta

SEQ ID NO: 303341 - DNA, 21 bp, Artificial sequence
  SiRNA target sequence
aatccaaggaagcagcgttat

SEQ ID NO: 303342 - DNA, 21 bp, Artificial sequence
  SiRNA target sequence
atccaaggaagcagcgttatt

SEQ ID NO: 303343 - DNA, 21 bp, Artificial sequence
  SiRNA target sequence
tccaaggaagcagcgttatta

SEQ ID NO: 303344 - DNA, 21 bp, Artificial sequence
  SiRNA target sequence
ccaaggaagcagcgttattag

SEQ ID NO: 303345 - DNA, 21 bp, Artificial sequence
  SiRNA target sequence
caaggaagcagcgttattagc

SEQ ID NO: 303346 - DNA, 21 bp, Artificial sequence
  SiRNA target sequence
aaggaagcagcgttattagcg

SEQ ID NO: 303347 - DNA, 21 bp, Artificial sequence
  SiRNA target sequence
aggaagcagcgttattagcgt

SEQ ID NO: 303348 - DNA, 21 bp, Artificial sequence
  SiRNA target sequence
ggaagcagcgttattagcgtt

SEQ ID NO: 303349 - DNA, 21 bp, Artificial sequence
  SiRNA target sequence
gaagcagcgttattagcgttc

SEQ ID NO: 303350 - DNA, 21 bp, Artificial sequence
  SiRNA target sequence
aagcagcgttattagcgttcc

SEQ ID NO: 303351 - DNA, 21 bp, Artificial sequence
  SiRNA target sequence
agcagcgttattagcgttccc

SEQ ID NO: 303352 - DNA, 21 bp, Artificial sequence
  SiRNA target sequence
gcagcgttattagcgttccct

SEQ ID NO: 303353 - DNA, 21 bp, Artificial sequence
  SiRNA target sequence
cagcgttattagcgttcccta

SEQ ID NO: 303354 - DNA, 21 bp, Artificial sequence
  SiRNA target sequence
agcgttattagcgttccctaa

SEQ ID NO: 303355 - DNA, 21 bp, Artificial sequence
  SiRNA target sequence
gcgttattagcgttccctaag

SEQ ID NO: 303356 - DNA, 21 bp, Artificial sequence
  SiRNA target sequence
cgttattagcgttccctaagt

SEQ ID NO: 303357 - DNA, 21 bp, Artificial sequence
  SiRNA target sequence
gttattagcgttccctaagtt

SEQ ID NO: 303358 - DNA, 21 bp, Artificial sequence
  SiRNA target sequence
ttattagcgttccctaagttc

SEQ ID NO: 303359 - DNA, 21 bp, Artificial sequence
  SiRNA target sequence
tattagcgttccctaagttcg

SEQ ID NO: 303360 - DNA, 21 bp, Artificial sequence
  SiRNA target sequence
attagcgttccctaagttcgt

SEQ ID NO: 303361 - DNA, 21 bp, Artificial sequence
  SiRNA target sequence
ttagcgttccctaagttcgta

SEQ ID NO: 303362 - DNA, 21 bp, Artificial sequence
  SiRNA target sequence
tagcgttccctaagttcgtat

SEQ ID NO: 303363 - DNA, 21 bp, Artificial sequence
  SiRNA target sequence
agcgttccctaagttcgtatg

SEQ ID NO: 303364 - DNA, 21 bp, Artificial sequence
  SiRNA target sequence
gcgttccctaagttcgtatgt

SEQ ID NO: 303365 - DNA, 21 bp, Artificial sequence
  SiRNA target sequence
cgttccctaagttcgtatgtc

SEQ ID NO: 303366 - DNA, 21 bp, Artificial sequence
  SiRNA target sequence
gttccctaagttcgtatgtca

SEQ ID NO: 303367 - DNA, 21 bp, Artificial sequence
  SiRNA target sequence
ttccctaagttcgtatgtcaa

SEQ ID NO: 303368 - DNA, 21 bp, Artificial sequence
  SiRNA target sequence
tccctaagttcgtatgtcaac

SEQ ID NO: 303369 - DNA, 21 bp, Artificial sequence
  SiRNA target sequence
ccctaagttcgtatgtcaaca

SEQ ID NO: 303370 - DNA, 21 bp, Artificial sequence
  SiRNA target sequence
cctaagttcgtatgtcaacac

SEQ ID NO: 303371 - DNA, 21 bp, Artificial sequence
  SiRNA target sequence
ctaagttcgtatgtcaacact

SEQ ID NO: 303372 - DNA, 21 bp, Artificial sequence
  SiRNA target sequence
taagttcgtatgtcaacactc

SEQ ID NO: 303373 - DNA, 21 bp, Artificial sequence
  SiRNA target sequence
aagttcgtatgtcaacactct

SEQ ID NO: 303374 - DNA, 21 bp, Artificial sequence
  SiRNA target sequence
agttcgtatgtcaacactctg

SEQ ID NO: 303375 - DNA, 21 bp, Artificial sequence
  SiRNA target sequence
gttcgtatgtcaacactctga

SEQ ID NO: 303376 - DNA, 21 bp, Artificial sequence
  SiRNA target sequence
ttcgtatgtcaacactctgac

SEQ ID NO: 303377 - DNA, 21 bp, Artificial sequence
  SiRNA target sequence
tcgtatgtcaacactctgaca

SEQ ID NO: 303378 - DNA, 21 bp, Artificial sequence
  SiRNA target sequence
cgtatgtcaacactctgacat

SEQ ID NO: 303379 - DNA, 21 bp, Artificial sequence
  SiRNA target sequence
gtatgtcaacactctgacatt

SEQ ID NO: 303380 - DNA, 21 bp, Artificial sequence
  SiRNA target sequence
tatgtcaacactctgacattg

SEQ ID NO: 303381 - DNA, 21 bp, Artificial sequence
  SiRNA target sequence
atgtcaacactctgacattgt

SEQ ID NO: 303382 - DNA, 21 bp, Artificial sequence
  SiRNA target sequence
tgtcaacactctgacattgta

SEQ ID NO: 303383 - DNA, 21 bp, Artificial sequence
  SiRNA target sequence
gtcaacactctgacattgtaa

SEQ ID NO: 303384 - DNA, 21 bp, Artificial sequence
  SiRNA target sequence
tcaacactctgacattgtaaa

SEQ ID NO: 303385 - DNA, 21 bp, Artificial sequence
  SiRNA target sequence
caacactctgacattgtaaag

SEQ ID NO: 303386 - DNA, 21 bp, Artificial sequence
  SiRNA target sequence
aacactctgacattgtaaagc

SEQ ID NO: 303387 - DNA, 21 bp, Artificial sequence
  SiRNA target sequence
acactctgacattgtaaagca

SEQ ID NO: 303388 - DNA, 21 bp, Artificial sequence
  SiRNA target sequence
cactctgacattgtaaagcac

SEQ ID NO: 303389 - DNA, 21 bp, Artificial sequence
  SiRNA target sequence
actctgacattgtaaagcact

SEQ ID NO: 303390 - DNA, 21 bp, Artificial sequence
  SiRNA target sequence
ctctgacattgtaaagcactt

SEQ ID NO: 303391 - DNA, 21 bp, Artificial sequence
  SiRNA target sequence
tctgacattgtaaagcacttt

SEQ ID NO: 303392 - DNA, 21 bp, Artificial sequence
  SiRNA target sequence
ctgacattgtaaagcactttc

SEQ ID NO: 303393 - DNA, 21 bp, Artificial sequence
  SiRNA target sequence
tgacattgtaaagcactttca

SEQ ID NO: 303394 - DNA, 21 bp, Artificial sequence
  SiRNA target sequence
gacattgtaaagcactttcaa

SEQ ID NO: 303395 - DNA, 21 bp, Artificial sequence
  SiRNA target sequence
acattgtaaagcactttcaaa

SEQ ID NO: 303396 - DNA, 21 bp, Artificial sequence
  SiRNA target sequence
cattgtaaagcactttcaaac

SEQ ID NO: 303397 - DNA, 21 bp, Artificial sequence
  SiRNA target sequence
attgtaaagcactttcaaact

SEQ ID NO: 303398 - DNA, 21 bp, Artificial sequence
  SiRNA target sequence
ttgtaaagcactttcaaactg

SEQ ID NO: 303399 - DNA, 21 bp, Artificial sequence
  SiRNA target sequence
tgtaaagcactttcaaactgc

SEQ ID NO: 303400 - DNA, 21 bp, Artificial sequence
  SiRNA target sequence
gtaaagcactttcaaactgct

SEQ ID NO: 303401 - DNA, 21 bp, Artificial sequence
  SiRNA target sequence
taaagcactttcaaactgctg

SEQ ID NO: 303402 - DNA, 21 bp, Artificial sequence
  SiRNA target sequence
aaagcactttcaaactgctga

SEQ ID NO: 303403 - DNA, 21 bp, Artificial sequence
  SiRNA target sequence
aagcactttcaaactgctgaa

SEQ ID NO: 303404 - DNA, 21 bp, Artificial sequence
  SiRNA target sequence
agcactttcaaactgctgaat

SEQ ID NO: 303405 - DNA, 21 bp, Artificial sequence
  SiRNA target sequence
gcactttcaaactgctgaatc

SEQ ID NO: 303406 - DNA, 21 bp, Artificial sequence
  SiRNA target sequence
cactttcaaactgctgaatca

SEQ ID NO: 303407 - DNA, 21 bp, Artificial sequence
  SiRNA target sequence
actttcaaactgctgaatcaa

SEQ ID NO: 303408 - DNA, 21 bp, Artificial sequence
  SiRNA target sequence
ctttcaaactgctgaatcaat

SEQ ID NO: 303409 - DNA, 21 bp, Artificial sequence
  SiRNA target sequence
tttcaaactgctgaatcaatg

SEQ ID NO: 303410 - DNA, 21 bp, Artificial sequence
  SiRNA target sequence
ttcaaactgctgaatcaatgt

SEQ ID NO: 303411 - DNA, 21 bp, Artificial sequence
  SiRNA target sequence
tcaaactgctgaatcaatgtc

SEQ ID NO: 303412 - DNA, 21 bp, Artificial sequence
  SiRNA target sequence
caaactgctgaatcaatgtca

SEQ ID NO: 303413 - DNA, 21 bp, Artificial sequence
  SiRNA target sequence
aaactgctgaatcaatgtcaa

SEQ ID NO: 303414 - DNA, 21 bp, Artificial sequence
  SiRNA target sequence
aactgctgaatcaatgtcaaa

SEQ ID NO: 303415 - DNA, 21 bp, Artificial sequence
  SiRNA target sequence
actgctgaatcaatgtcaaag

SEQ ID NO: 303416 - DNA, 21 bp, Artificial sequence
  SiRNA target sequence
ctgctgaatcaatgtcaaagt

SEQ ID NO: 303417 - DNA, 21 bp, Artificial sequence
  SiRNA target sequence
tgctgaatcaatgtcaaagtt

SEQ ID NO: 303418 - DNA, 21 bp, Artificial sequence
  SiRNA target sequence
gctgaatcaatgtcaaagttt

SEQ ID NO: 303419 - DNA, 21 bp, Artificial sequence
  SiRNA target sequence
ctgaatcaatgtcaaagttta

SEQ ID NO: 303420 - DNA, 21 bp, Artificial sequence
  SiRNA target sequence
tgaatcaatgtcaaagtttaa

SEQ ID NO: 303421 - DNA, 21 bp, Artificial sequence
  SiRNA target sequence
gaatcaatgtcaaagtttaag

SEQ ID NO: 303422 - DNA, 21 bp, Artificial sequence
  SiRNA target sequence
aatcaatgtcaaagtttaagc

SEQ ID NO: 303423 - DNA, 21 bp, Artificial sequence
  SiRNA target sequence
atcaatgtcaaagtttaagcg

SEQ ID NO: 303424 - DNA, 21 bp, Artificial sequence
  SiRNA target sequence
tcaatgtcaaagtttaagcga

SEQ ID NO: 303425 - DNA, 21 bp, Artificial sequence
  SiRNA target sequence
caatgtcaaagtttaagcgat

SEQ ID NO: 303426 - DNA, 21 bp, Artificial sequence
  SiRNA target sequence
aatgtcaaagtttaagcgatg

SEQ ID NO: 303427 - DNA, 21 bp, Artificial sequence
  SiRNA target sequence
atgtcaaagtttaagcgatgt

SEQ ID NO: 303428 - DNA, 21 bp, Artificial sequence
  SiRNA target sequence
tgtcaaagtttaagcgatgtg

SEQ ID NO: 303429 - DNA, 21 bp, Artificial sequence
  SiRNA target sequence
gtcaaagtttaagcgatgtga

SEQ ID NO: 303430 - DNA, 21 bp, Artificial sequence
  SiRNA target sequence
tcaaagtttaagcgatgtgag

SEQ ID NO: 303431 - DNA, 21 bp, Artificial sequence
  SiRNA target sequence
caaagtttaagcgatgtgagg

SEQ ID NO: 303432 - DNA, 21 bp, Artificial sequence
  SiRNA target sequence
aaagtttaagcgatgtgaggt

SEQ ID NO: 303433 - DNA, 21 bp, Artificial sequence
  SiRNA target sequence
aagtttaagcgatgtgaggtc

SEQ ID NO: 303434 - DNA, 21 bp, Artificial sequence
  SiRNA target sequence
agtttaagcgatgtgaggtca

SEQ ID NO: 303435 - DNA, 21 bp, Artificial sequence
  SiRNA target sequence
gtttaagcgatgtgaggtcac

SEQ ID NO: 303436 - DNA, 21 bp, Artificial sequence
  SiRNA target sequence
tttaagcgatgtgaggtcaca

SEQ ID NO: 303437 - DNA, 21 bp, Artificial sequence
  SiRNA target sequence
ttaagcgatgtgaggtcacat

SEQ ID NO: 303438 - DNA, 21 bp, Artificial sequence
  SiRNA target sequence
taagcgatgtgaggtcacatt

SEQ ID NO: 303439 - DNA, 21 bp, Artificial sequence
  SiRNA target sequence
aagcgatgtgaggtcacatta

SEQ ID NO: 303440 - DNA, 21 bp, Artificial sequence
  SiRNA target sequence
agcgatgtgaggtcacattac

SEQ ID NO: 303441 - DNA, 21 bp, Artificial sequence
  SiRNA target sequence
gcgatgtgaggtcacattacc

SEQ ID NO: 303442 - DNA, 21 bp, Artificial sequence
  SiRNA target sequence
cgatgtgaggtcacattacct

SEQ ID NO: 303443 - DNA, 21 bp, Artificial sequence
  SiRNA target sequence
gatgtgaggtcacattacctg

SEQ ID NO: 303444 - DNA, 21 bp, Artificial sequence
  SiRNA target sequence
atgtgaggtcacattacctgt

SEQ ID NO: 303445 - DNA, 21 bp, Artificial sequence
  SiRNA target sequence
tgtgaggtcacattacctgta

SEQ ID NO: 303446 - DNA, 21 bp, Artificial sequence
  SiRNA target sequence
gtgaggtcacattacctgtat

SEQ ID NO: 303447 - DNA, 21 bp, Artificial sequence
  SiRNA target sequence
tgaggtcacattacctgtatt

SEQ ID NO: 303448 - DNA, 21 bp, Artificial sequence
  SiRNA target sequence
gaggtcacattacctgtattg

SEQ ID NO: 303449 - DNA, 21 bp, Artificial sequence
  SiRNA target sequence
aggtcacattacctgtattgc

SEQ ID NO: 303450 - DNA, 21 bp, Artificial sequence
  SiRNA target sequence
ggtcacattacctgtattgcg

SEQ ID NO: 303451 - DNA, 21 bp, Artificial sequence
  SiRNA target sequence
gtcacattacctgtattgcgt

SEQ ID NO: 303452 - DNA, 21 bp, Artificial sequence
  SiRNA target sequence
tcacattacctgtattgcgtt

SEQ ID NO: 303453 - DNA, 21 bp, Artificial sequence
  SiRNA target sequence
cacattacctgtattgcgtta

SEQ ID NO: 303454 - DNA, 21 bp, Artificial sequence
  SiRNA target sequence
acattacctgtattgcgttac

SEQ ID NO: 303455 - DNA, 21 bp, Artificial sequence
  SiRNA target sequence
cattacctgtattgcgttact

SEQ ID NO: 303456 - DNA, 21 bp, Artificial sequence
  SiRNA target sequence
attacctgtattgcgttactc

SEQ ID NO: 303457 - DNA, 21 bp, Artificial sequence
  SiRNA target sequence
ttacctgtattgcgttactct

SEQ ID NO: 303458 - DNA, 21 bp, Artificial sequence
  SiRNA target sequence
tacctgtattgcgttactctc

SEQ ID NO: 303459 - DNA, 21 bp, Artificial sequence
  SiRNA target sequence
acctgtattgcgttactctca

SEQ ID NO: 303460 - DNA, 21 bp, Artificial sequence
  SiRNA target sequence
cctgtattgcgttactctcaa

SEQ ID NO: 303461 - DNA, 21 bp, Artificial sequence
  SiRNA target sequence
ctgtattgcgttactctcaaa

SEQ ID NO: 303462 - DNA, 21 bp, Artificial sequence
  SiRNA target sequence
tgtattgcgttactctcaaaa

SEQ ID NO: 303463 - DNA, 21 bp, Artificial sequence
  SiRNA target sequence
gtattgcgttactctcaaaaa

SEQ ID NO: 303464 - DNA, 21 bp, Artificial sequence
  SiRNA target sequence
tattgcgttactctcaaaaat

SEQ ID NO: 303465 - DNA, 21 bp, Artificial sequence
  SiRNA target sequence
attgcgttactctcaaaaatt

SEQ ID NO: 303466 - DNA, 21 bp, Artificial sequence
  SiRNA target sequence
ttgcgttactctcaaaaattg

SEQ ID NO: 303467 - DNA, 21 bp, Artificial sequence
  SiRNA target sequence
tgcgttactctcaaaaattgg

SEQ ID NO: 303468 - DNA, 21 bp, Artificial sequence
  SiRNA target sequence
gcgttactctcaaaaattgga

SEQ ID NO: 303469 - DNA, 21 bp, Artificial sequence
  SiRNA target sequence
cgttactctcaaaaattggaa

SEQ ID NO: 303470 - DNA, 21 bp, Artificial sequence
  SiRNA target sequence
gttactctcaaaaattggaaa

SEQ ID NO: 303471 - DNA, 21 bp, Artificial sequence
  SiRNA target sequence
ttactctcaaaaattggaaag

SEQ ID NO: 303472 - DNA, 21 bp, Artificial sequence
  SiRNA target sequence
tactctcaaaaattggaaaga

SEQ ID NO: 303473 - DNA, 21 bp, Artificial sequence
  SiRNA target sequence
actctcaaaaattggaaagat

SEQ ID NO: 303474 - DNA, 21 bp, Artificial sequence
  SiRNA target sequence
ctctcaaaaattggaaagatt

SEQ ID NO: 303475 - DNA, 21 bp, Artificial sequence
  SiRNA target sequence
tctcaaaaattggaaagattt

SEQ ID NO: 303476 - DNA, 21 bp, Artificial sequence
  SiRNA target sequence
ctcaaaaattggaaagattta

SEQ ID NO: 303477 - DNA, 21 bp, Artificial sequence
  SiRNA target sequence
tcaaaaattggaaagatttat

SEQ ID NO: 303478 - DNA, 21 bp, Artificial sequence
  SiRNA target sequence
caaaaattggaaagatttatg

SEQ ID NO: 303479 - DNA, 21 bp, Artificial sequence
  SiRNA target sequence
aaaaattggaaagatttatgt

SEQ ID NO: 303480 - DNA, 21 bp, Artificial sequence
  SiRNA target sequence
aaaattggaaagatttatgtc

SEQ ID NO: 303481 - DNA, 21 bp, Artificial sequence
  SiRNA target sequence
aaattggaaagatttatgtct

SEQ ID NO: 303482 - DNA, 21 bp, Artificial sequence
  SiRNA target sequence
aattggaaagatttatgtctt

SEQ ID NO: 303483 - DNA, 21 bp, Artificial sequence
  SiRNA target sequence
attggaaagatttatgtcttc

SEQ ID NO: 303484 - DNA, 21 bp, Artificial sequence
  SiRNA target sequence
ttggaaagatttatgtcttcc

SEQ ID NO: 303485 - DNA, 21 bp, Artificial sequence
  SiRNA target sequence
tggaaagatttatgtcttccc

SEQ ID NO: 303486 - DNA, 21 bp, Artificial sequence
  SiRNA target sequence
ggaaagatttatgtcttccct

SEQ ID NO: 303487 - DNA, 21 bp, Artificial sequence
  SiRNA target sequence
gaaagatttatgtcttccctt

SEQ ID NO: 303488 - DNA, 21 bp, Artificial sequence
  SiRNA target sequence
aaagatttatgtcttccctta

SEQ ID NO: 303489 - DNA, 21 bp, Artificial sequence
  SiRNA target sequence
aagatttatgtcttcccttat

SEQ ID NO: 303490 - DNA, 21 bp, Artificial sequence
  SiRNA target sequence
agatttatgtcttcccttatt

SEQ ID NO: 303491 - DNA, 21 bp, Artificial sequence
  SiRNA target sequence
gatttatgtcttcccttattg

SEQ ID NO: 303492 - DNA, 21 bp, Artificial sequence
  SiRNA target sequence
atttatgtcttcccttattga

SEQ ID NO: 303493 - DNA, 21 bp, Artificial sequence
  SiRNA target sequence
tttatgtcttcccttattgaa

SEQ ID NO: 303494 - DNA, 21 bp, Artificial sequence
  SiRNA target sequence
ttatgtcttcccttattgaat

SEQ ID NO: 303495 - DNA, 21 bp, Artificial sequence
  SiRNA target sequence
tatgtcttcccttattgaatg

SEQ ID NO: 303496 - DNA, 21 bp, Artificial sequence
  SiRNA target sequence
atgtcttcccttattgaatgt

SEQ ID NO: 303497 - DNA, 21 bp, Artificial sequence
  SiRNA target sequence
tgtcttcccttattgaatgtg

SEQ ID NO: 303498 - DNA, 21 bp, Artificial sequence
  SiRNA target sequence
gtcttcccttattgaatgtga

SEQ ID NO: 303499 - DNA, 21 bp, Artificial sequence
  SiRNA target sequence
tcttcccttattgaatgtgat

SEQ ID NO: 303500 - DNA, 21 bp, Artificial sequence
  SiRNA target sequence
cttcccttattgaatgtgata

SEQ ID NO: 303501 - DNA, 21 bp, Artificial sequence
  SiRNA target sequence
ttcccttattgaatgtgataa

SEQ ID NO: 303502 - DNA, 21 bp, Artificial sequence
  SiRNA target sequence
tcccttattgaatgtgataaa

SEQ ID NO: 303503 - DNA, 21 bp, Artificial sequence
  SiRNA target sequence
cccttattgaatgtgataaag

SEQ ID NO: 303504 - DNA, 21 bp, Artificial sequence
  SiRNA target sequence
ccttattgaatgtgataaagt

SEQ ID NO: 303505 - DNA, 21 bp, Artificial sequence
  SiRNA target sequence
cttattgaatgtgataaagta

SEQ ID NO: 303506 - DNA, 21 bp, Artificial sequence
  SiRNA target sequence
ttattgaatgtgataaagtag

SEQ ID NO: 303507 - DNA, 21 bp, Artificial sequence
  SiRNA target sequence
tattgaatgtgataaagtaga

SEQ ID NO: 303508 - DNA, 21 bp, Artificial sequence
  SiRNA target sequence
attgaatgtgataaagtagag

SEQ ID NO: 303509 - DNA, 21 bp, Artificial sequence
  SiRNA target sequence
ttgaatgtgataaagtagagg

SEQ ID NO: 303510 - DNA, 21 bp, Artificial sequence
  SiRNA target sequence
tgaatgtgataaagtagaggc

SEQ ID NO: 303511 - DNA, 21 bp, Artificial sequence
  SiRNA target sequence
gaatgtgataaagtagaggca

SEQ ID NO: 303512 - DNA, 21 bp, Artificial sequence
  SiRNA target sequence
aatgtgataaagtagaggcat

SEQ ID NO: 303513 - DNA, 21 bp, Artificial sequence
  SiRNA target sequence
atgtgataaagtagaggcatg

SEQ ID NO: 303514 - DNA, 21 bp, Artificial sequence
  SiRNA target sequence
tgtgataaagtagaggcatgt

SEQ ID NO: 303515 - DNA, 21 bp, Artificial sequence
  SiRNA target sequence
gtgataaagtagaggcatgtg

SEQ ID NO: 303516 - DNA, 21 bp, Artificial sequence
  SiRNA target sequence
tgataaagtagaggcatgtga

SEQ ID NO: 303517 - DNA, 21 bp, Artificial sequence
  SiRNA target sequence
gataaagtagaggcatgtgat

SEQ ID NO: 303518 - DNA, 21 bp, Artificial sequence
  SiRNA target sequence
ataaagtagaggcatgtgata

SEQ ID NO: 303519 - DNA, 21 bp, Artificial sequence
  SiRNA target sequence
taaagtagaggcatgtgataa

SEQ ID NO: 303520 - DNA, 21 bp, Artificial sequence
  SiRNA target sequence
aaagtagaggcatgtgataaa

SEQ ID NO: 303521 - DNA, 21 bp, Artificial sequence
  SiRNA target sequence
aagtagaggcatgtgataaaa

SEQ ID NO: 303522 - DNA, 21 bp, Artificial sequence
  SiRNA target sequence
agtagaggcatgtgataaaac

SEQ ID NO: 303523 - DNA, 21 bp, Artificial sequence
  SiRNA target sequence
gtagaggcatgtgataaaact

SEQ ID NO: 303524 - DNA, 21 bp, Artificial sequence
  SiRNA target sequence
tagaggcatgtgataaaactt

SEQ ID NO: 303525 - DNA, 21 bp, Artificial sequence
  SiRNA target sequence
agaggcatgtgataaaactta

SEQ ID NO: 303526 - DNA, 21 bp, Artificial sequence
  SiRNA target sequence
gaggcatgtgataaaacttat

SEQ ID NO: 303527 - DNA, 21 bp, Artificial sequence
  SiRNA target sequence
aggcatgtgataaaacttata

SEQ ID NO: 303528 - DNA, 21 bp, Artificial sequence
  SiRNA target sequence
ggcatgtgataaaacttatac

SEQ ID NO: 303529 - DNA, 21 bp, Artificial sequence
  SiRNA target sequence
gcatgtgataaaacttatacg

SEQ ID NO: 303530 - DNA, 21 bp, Artificial sequence
  SiRNA target sequence
catgtgataaaacttatacgc

SEQ ID NO: 303531 - DNA, 21 bp, Artificial sequence
  SiRNA target sequence
atgtgataaaacttatacgct

SEQ ID NO: 303532 - DNA, 21 bp, Artificial sequence
  SiRNA target sequence
tgtgataaaacttatacgcta

SEQ ID NO: 303533 - DNA, 21 bp, Artificial sequence
  SiRNA target sequence
gtgataaaacttatacgctaa

SEQ ID NO: 303534 - DNA, 21 bp, Artificial sequence
  SiRNA target sequence
tgataaaacttatacgctaaa

SEQ ID NO: 303535 - DNA, 21 bp, Artificial sequence
  SiRNA target sequence
gataaaacttatacgctaaat

SEQ ID NO: 303536 - DNA, 21 bp, Artificial sequence
  SiRNA target sequence
ataaaacttatacgctaaatg

SEQ ID NO: 303537 - DNA, 21 bp, Artificial sequence
  SiRNA target sequence
taaaacttatacgctaaatga

SEQ ID NO: 303538 - DNA, 21 bp, Artificial sequence
  SiRNA target sequence
aaaacttatacgctaaatgat

SEQ ID NO: 303539 - DNA, 21 bp, Artificial sequence
  SiRNA target sequence
aaacttatacgctaaatgatg

SEQ ID NO: 303540 - DNA, 21 bp, Artificial sequence
  SiRNA target sequence
aacttatacgctaaatgatgt

SEQ ID NO: 303541 - DNA, 21 bp, Artificial sequence
  SiRNA target sequence
acttatacgctaaatgatgtt

SEQ ID NO: 303542 - DNA, 21 bp, Artificial sequence
  SiRNA target sequence
cttatacgctaaatgatgtta

SEQ ID NO: 303543 - DNA, 21 bp, Artificial sequence
  SiRNA target sequence
ttatacgctaaatgatgttaa

SEQ ID NO: 303544 - DNA, 21 bp, Artificial sequence
  SiRNA target sequence
tatacgctaaatgatgttaag

SEQ ID NO: 303545 - DNA, 21 bp, Artificial sequence
  SiRNA target sequence
atacgctaaatgatgttaaga

SEQ ID NO: 303546 - DNA, 21 bp, Artificial sequence
  SiRNA target sequence
tacgctaaatgatgttaagaa

SEQ ID NO: 303547 - DNA, 21 bp, Artificial sequence
  SiRNA target sequence
acgctaaatgatgttaagaaa

SEQ ID NO: 303548 - DNA, 21 bp, Artificial sequence
  SiRNA target sequence
cgctaaatgatgttaagaaag

SEQ ID NO: 303549 - DNA, 21 bp, Artificial sequence
  SiRNA target sequence
gctaaatgatgttaagaaagg

SEQ ID NO: 303550 - DNA, 21 bp, Artificial sequence
  SiRNA target sequence
ctaaatgatgttaagaaagga

SEQ ID NO: 303551 - DNA, 21 bp, Artificial sequence
  SiRNA target sequence
taaatgatgttaagaaaggac

SEQ ID NO: 303552 - DNA, 21 bp, Artificial sequence
  SiRNA target sequence
aaatgatgttaagaaaggaca

SEQ ID NO: 303553 - DNA, 21 bp, Artificial sequence
  SiRNA target sequence
aatgatgttaagaaaggacaa

SEQ ID NO: 303554 - DNA, 21 bp, Artificial sequence
  SiRNA target sequence
atgatgttaagaaaggacaat

SEQ ID NO: 303555 - DNA, 21 bp, Artificial sequence
  SiRNA target sequence
tgatgttaagaaaggacaata

SEQ ID NO: 303556 - DNA, 21 bp, Artificial sequence
  SiRNA target sequence
gatgttaagaaaggacaatat

SEQ ID NO: 303557 - DNA, 21 bp, Artificial sequence
  SiRNA target sequence
atgttaagaaaggacaatata

SEQ ID NO: 303558 - DNA, 21 bp, Artificial sequence
  SiRNA target sequence
tgttaagaaaggacaatatat

SEQ ID NO: 303559 - DNA, 21 bp, Artificial sequence
  SiRNA target sequence
gttaagaaaggacaatatata

SEQ ID NO: 303560 - DNA, 21 bp, Artificial sequence
  SiRNA target sequence
ttaagaaaggacaatatatat

SEQ ID NO: 303561 - DNA, 21 bp, Artificial sequence
  SiRNA target sequence
taagaaaggacaatatatatt

SEQ ID NO: 303562 - DNA, 21 bp, Artificial sequence
  SiRNA target sequence
aagaaaggacaatatatattg

SEQ ID NO: 303563 - DNA, 21 bp, Artificial sequence
  SiRNA target sequence
agaaaggacaatatatattgc

SEQ ID NO: 303564 - DNA, 21 bp, Artificial sequence
  SiRNA target sequence
gaaaggacaatatatattgcg

SEQ ID NO: 303565 - DNA, 21 bp, Artificial sequence
  SiRNA target sequence
aaaggacaatatatattgcga

SEQ ID NO: 303566 - DNA, 21 bp, Artificial sequence
  SiRNA target sequence
aaggacaatatatattgcgac

SEQ ID NO: 303567 - DNA, 21 bp, Artificial sequence
  SiRNA target sequence
aggacaatatatattgcgaca

SEQ ID NO: 303568 - DNA, 21 bp, Artificial sequence
  SiRNA target sequence
ggacaatatatattgcgacaa

SEQ ID NO: 303569 - DNA, 21 bp, Artificial sequence
  SiRNA target sequence
gacaatatatattgcgacaag

SEQ ID NO: 303570 - DNA, 21 bp, Artificial sequence
  SiRNA target sequence
acaatatatattgcgacaagg

SEQ ID NO: 303571 - DNA, 21 bp, Artificial sequence
  SiRNA target sequence
caatatatattgcgacaagga

SEQ ID NO: 303572 - DNA, 21 bp, Artificial sequence
  SiRNA target sequence
aatatatattgcgacaaggat

SEQ ID NO: 303573 - DNA, 21 bp, Artificial sequence
  SiRNA target sequence
atatatattgcgacaaggatt

SEQ ID NO: 303574 - DNA, 21 bp, Artificial sequence
  SiRNA target sequence
tatatattgcgacaaggatta

SEQ ID NO: 303575 - DNA, 21 bp, Artificial sequence
  SiRNA target sequence
atatattgcgacaaggattag

SEQ ID NO: 303576 - DNA, 21 bp, Artificial sequence
  SiRNA target sequence
tatattgcgacaaggattaga

SEQ ID NO: 303577 - DNA, 21 bp, Artificial sequence
  SiRNA target sequence
atattgcgacaaggattagaa

SEQ ID NO: 303578 - DNA, 21 bp, Artificial sequence
  SiRNA target sequence
tattgcgacaaggattagaat

SEQ ID NO: 303579 - DNA, 21 bp, Artificial sequence
  SiRNA target sequence
attgcgacaaggattagaata

SEQ ID NO: 303580 - DNA, 21 bp, Artificial sequence
  SiRNA target sequence
ttgcgacaaggattagaatat

SEQ ID NO: 303581 - DNA, 21 bp, Artificial sequence
  SiRNA target sequence
tgcgacaaggattagaatata

SEQ ID NO: 303582 - DNA, 21 bp, Artificial sequence
  SiRNA target sequence
gcgacaaggattagaatatac

SEQ ID NO: 303583 - DNA, 21 bp, Artificial sequence
  SiRNA target sequence
cgacaaggattagaatatacg

SEQ ID NO: 303584 - DNA, 21 bp, Artificial sequence
  SiRNA target sequence
gacaaggattagaatatacga

SEQ ID NO: 303585 - DNA, 21 bp, Artificial sequence
  SiRNA target sequence
acaaggattagaatatacgat

SEQ ID NO: 303586 - DNA, 21 bp, Artificial sequence
  SiRNA target sequence
caaggattagaatatacgatg

SEQ ID NO: 303587 - DNA, 21 bp, Artificial sequence
  SiRNA target sequence
aaggattagaatatacgatgc

SEQ ID NO: 303588 - DNA, 21 bp, Artificial sequence
  SiRNA target sequence
aggattagaatatacgatgcc

SEQ ID NO: 303589 - DNA, 21 bp, Artificial sequence
  SiRNA target sequence
ggattagaatatacgatgccg

SEQ ID NO: 303590 - DNA, 21 bp, Artificial sequence
  SiRNA target sequence
gattagaatatacgatgccga

SEQ ID NO: 303591 - DNA, 21 bp, Artificial sequence
  SiRNA target sequence
attagaatatacgatgccgac

SEQ ID NO: 303592 - DNA, 21 bp, Artificial sequence
  SiRNA target sequence
ttagaatatacgatgccgaca

SEQ ID NO: 303593 - DNA, 21 bp, Artificial sequence
  SiRNA target sequence
tagaatatacgatgccgacaa

SEQ ID NO: 303594 - DNA, 21 bp, Artificial sequence
  SiRNA target sequence
agaatatacgatgccgacaat

SEQ ID NO: 303595 - DNA, 21 bp, Artificial sequence
  SiRNA target sequence
gaatatacgatgccgacaatt

SEQ ID NO: 303596 - DNA, 21 bp, Artificial sequence
  SiRNA target sequence
aatatacgatgccgacaattg

SEQ ID NO: 303597 - DNA, 21 bp, Artificial sequence
  SiRNA target sequence
atatacgatgccgacaattga

SEQ ID NO: 303598 - DNA, 21 bp, Artificial sequence
  SiRNA target sequence
tatacgatgccgacaattgat

SEQ ID NO: 303599 - DNA, 21 bp, Artificial sequence
  SiRNA target sequence
atacgatgccgacaattgatg

SEQ ID NO: 303600 - DNA, 21 bp, Artificial sequence
  SiRNA target sequence
tacgatgccgacaattgatgg

SEQ ID NO: 303601 - DNA, 21 bp, Artificial sequence
  SiRNA target sequence
acgatgccgacaattgatggt

SEQ ID NO: 303602 - DNA, 21 bp, Artificial sequence
  SiRNA target sequence
cgatgccgacaattgatggtg

SEQ ID NO: 303603 - DNA, 21 bp, Artificial sequence
  SiRNA target sequence
gatgccgacaattgatggtga

SEQ ID NO: 303604 - DNA, 21 bp, Artificial sequence
  SiRNA target sequence
atgccgacaattgatggtgat

SEQ ID NO: 303605 - DNA, 21 bp, Artificial sequence
  SiRNA target sequence
tgccgacaattgatggtgatt

SEQ ID NO: 303606 - DNA, 21 bp, Artificial sequence
  SiRNA target sequence
gccgacaattgatggtgattg

SEQ ID NO: 303607 - DNA, 21 bp, Artificial sequence
  SiRNA target sequence
ccgacaattgatggtgattgt

SEQ ID NO: 303608 - DNA, 21 bp, Artificial sequence
  SiRNA target sequence
cgacaattgatggtgattgtg

SEQ ID NO: 303609 - DNA, 21 bp, Artificial sequence
  SiRNA target sequence
gacaattgatggtgattgtgg

SEQ ID NO: 303610 - DNA, 21 bp, Artificial sequence
  SiRNA target sequence
acaattgatggtgattgtgga

SEQ ID NO: 303611 - DNA, 21 bp, Artificial sequence
  SiRNA target sequence
caattgatggtgattgtggag

SEQ ID NO: 303612 - DNA, 21 bp, Artificial sequence
  SiRNA target sequence
aattgatggtgattgtggagc

SEQ ID NO: 303613 - DNA, 21 bp, Artificial sequence
  SiRNA target sequence
attgatggtgattgtggagcc

SEQ ID NO: 303614 - DNA, 21 bp, Artificial sequence
  SiRNA target sequence
ttgatggtgattgtggagccc

SEQ ID NO: 303615 - DNA, 21 bp, Artificial sequence
  SiRNA target sequence
tgatggtgattgtggagcccc

SEQ ID NO: 303616 - DNA, 21 bp, Artificial sequence
  SiRNA target sequence
gatggtgattgtggagcccca

SEQ ID NO: 303617 - DNA, 21 bp, Artificial sequence
  SiRNA target sequence
atggtgattgtggagccccac

SEQ ID NO: 303618 - DNA, 21 bp, Artificial sequence
  SiRNA target sequence
tggtgattgtggagccccact

SEQ ID NO: 303619 - DNA, 21 bp, Artificial sequence
  SiRNA target sequence
ggtgattgtggagccccacta

SEQ ID NO: 303620 - DNA, 21 bp, Artificial sequence
  SiRNA target sequence
gtgattgtggagccccactaa

SEQ ID NO: 303621 - DNA, 21 bp, Artificial sequence
  SiRNA target sequence
tgattgtggagccccactaat

SEQ ID NO: 303622 - DNA, 21 bp, Artificial sequence
  SiRNA target sequence
gattgtggagccccactaatc

SEQ ID NO: 303623 - DNA, 21 bp, Artificial sequence
  SiRNA target sequence
attgtggagccccactaatca

SEQ ID NO: 303624 - DNA, 21 bp, Artificial sequence
  SiRNA target sequence
ttgtggagccccactaatcat

SEQ ID NO: 303625 - DNA, 21 bp, Artificial sequence
  SiRNA target sequence
tgtggagccccactaatcatc

SEQ ID NO: 303626 - DNA, 21 bp, Artificial sequence
  SiRNA target sequence
gtggagccccactaatcatca

SEQ ID NO: 303627 - DNA, 21 bp, Artificial sequence
  SiRNA target sequence
tggagccccactaatcatcaa

SEQ ID NO: 303628 - DNA, 21 bp, Artificial sequence
  SiRNA target sequence
ggagccccactaatcatcaat

SEQ ID NO: 303629 - DNA, 21 bp, Artificial sequence
  SiRNA target sequence
gagccccactaatcatcaatg

SEQ ID NO: 303630 - DNA, 21 bp, Artificial sequence
  SiRNA target sequence
agccccactaatcatcaatga

SEQ ID NO: 303631 - DNA, 21 bp, Artificial sequence
  SiRNA target sequence
gccccactaatcatcaatgaa

SEQ ID NO: 303632 - DNA, 21 bp, Artificial sequence
  SiRNA target sequence
ccccactaatcatcaatgaaa

SEQ ID NO: 303633 - DNA, 21 bp, Artificial sequence
  SiRNA target sequence
cccactaatcatcaatgaaac

SEQ ID NO: 303634 - DNA, 21 bp, Artificial sequence
  SiRNA target sequence
ccactaatcatcaatgaaaca

SEQ ID NO: 303635 - DNA, 21 bp, Artificial sequence
  SiRNA target sequence
cactaatcatcaatgaaacac

SEQ ID NO: 303636 - DNA, 21 bp, Artificial sequence
  SiRNA target sequence
actaatcatcaatgaaacaca

SEQ ID NO: 303637 - DNA, 21 bp, Artificial sequence
  SiRNA target sequence
ctaatcatcaatgaaacacag

SEQ ID NO: 303638 - DNA, 21 bp, Artificial sequence
  SiRNA target sequence
taatcatcaatgaaacacagg

SEQ ID NO: 303639 - DNA, 21 bp, Artificial sequence
  SiRNA target sequence
aatcatcaatgaaacacaggt

SEQ ID NO: 303640 - DNA, 21 bp, Artificial sequence
  SiRNA target sequence
atcatcaatgaaacacaggtt

SEQ ID NO: 303641 - DNA, 21 bp, Artificial sequence
  SiRNA target sequence
tcatcaatgaaacacaggtta

SEQ ID NO: 303642 - DNA, 21 bp, Artificial sequence
  SiRNA target sequence
catcaatgaaacacaggttac

SEQ ID NO: 303643 - DNA, 21 bp, Artificial sequence
  SiRNA target sequence
atcaatgaaacacaggttact

SEQ ID NO: 303644 - DNA, 21 bp, Artificial sequence
  SiRNA target sequence
tcaatgaaacacaggttacta

SEQ ID NO: 303645 - DNA, 21 bp, Artificial sequence
  SiRNA target sequence
caatgaaacacaggttactag

SEQ ID NO: 303646 - DNA, 21 bp, Artificial sequence
  SiRNA target sequence
aatgaaacacaggttactaga

SEQ ID NO: 303647 - DNA, 21 bp, Artificial sequence
  SiRNA target sequence
atgaaacacaggttactagaa

SEQ ID NO: 303648 - DNA, 21 bp, Artificial sequence
  SiRNA target sequence
tgaaacacaggttactagaaa

SEQ ID NO: 303649 - DNA, 21 bp, Artificial sequence
  SiRNA target sequence
gaaacacaggttactagaaag

SEQ ID NO: 303650 - DNA, 21 bp, Artificial sequence
  SiRNA target sequence
aaacacaggttactagaaaga

SEQ ID NO: 303651 - DNA, 21 bp, Artificial sequence
  SiRNA target sequence
aacacaggttactagaaagat

SEQ ID NO: 303652 - DNA, 21 bp, Artificial sequence
  SiRNA target sequence
acacaggttactagaaagata

SEQ ID NO: 303653 - DNA, 21 bp, Artificial sequence
  SiRNA target sequence
cacaggttactagaaagatag

SEQ ID NO: 303654 - DNA, 21 bp, Artificial sequence
  SiRNA target sequence
acaggttactagaaagatagc

SEQ ID NO: 303655 - DNA, 21 bp, Artificial sequence
  SiRNA target sequence
caggttactagaaagatagct

SEQ ID NO: 303656 - DNA, 21 bp, Artificial sequence
  SiRNA target sequence
aggttactagaaagatagctg

SEQ ID NO: 303657 - DNA, 21 bp, Artificial sequence
  SiRNA target sequence
ggttactagaaagatagctgg

SEQ ID NO: 303658 - DNA, 21 bp, Artificial sequence
  SiRNA target sequence
gttactagaaagatagctggt

SEQ ID NO: 303659 - DNA, 21 bp, Artificial sequence
  SiRNA target sequence
ttactagaaagatagctggta

SEQ ID NO: 303660 - DNA, 21 bp, Artificial sequence
  SiRNA target sequence
tactagaaagatagctggtat

SEQ ID NO: 303661 - DNA, 21 bp, Artificial sequence
  SiRNA target sequence
actagaaagatagctggtata

SEQ ID NO: 303662 - DNA, 21 bp, Artificial sequence
  SiRNA target sequence
ctagaaagatagctggtatac

SEQ ID NO: 303663 - DNA, 21 bp, Artificial sequence
  SiRNA target sequence
tagaaagatagctggtataca

SEQ ID NO: 303664 - DNA, 21 bp, Artificial sequence
  SiRNA target sequence
agaaagatagctggtatacat

SEQ ID NO: 303665 - DNA, 21 bp, Artificial sequence
  SiRNA target sequence
gaaagatagctggtatacatg

SEQ ID NO: 303666 - DNA, 21 bp, Artificial sequence
  SiRNA target sequence
aaagatagctggtatacatgt

SEQ ID NO: 303667 - DNA, 21 bp, Artificial sequence
  SiRNA target sequence
aagatagctggtatacatgtt

SEQ ID NO: 303668 - DNA, 21 bp, Artificial sequence
  SiRNA target sequence
agatagctggtatacatgttg

SEQ ID NO: 303669 - DNA, 21 bp, Artificial sequence
  SiRNA target sequence
gatagctggtatacatgttgc

SEQ ID NO: 303670 - DNA, 21 bp, Artificial sequence
  SiRNA target sequence
atagctggtatacatgttgct

SEQ ID NO: 303671 - DNA, 21 bp, Artificial sequence
  SiRNA target sequence
tagctggtatacatgttgctg

SEQ ID NO: 303672 - DNA, 21 bp, Artificial sequence
  SiRNA target sequence
agctggtatacatgttgctgg

SEQ ID NO: 303673 - DNA, 21 bp, Artificial sequence
  SiRNA target sequence
gctggtatacatgttgctggt

SEQ ID NO: 303674 - DNA, 21 bp, Artificial sequence
  SiRNA target sequence
ctggtatacatgttgctggtg

SEQ ID NO: 303675 - DNA, 21 bp, Artificial sequence
  SiRNA target sequence
tggtatacatgttgctggtgc

SEQ ID NO: 303676 - DNA, 21 bp, Artificial sequence
  SiRNA target sequence
ggtatacatgttgctggtgca

SEQ ID NO: 303677 - DNA, 21 bp, Artificial sequence
  SiRNA target sequence
gtatacatgttgctggtgcag

SEQ ID NO: 303678 - DNA, 21 bp, Artificial sequence
  SiRNA target sequence
tatacatgttgctggtgcagc

SEQ ID NO: 303679 - DNA, 21 bp, Artificial sequence
  SiRNA target sequence
atacatgttgctggtgcagca

SEQ ID NO: 303680 - DNA, 21 bp, Artificial sequence
  SiRNA target sequence
tacatgttgctggtgcagcat

SEQ ID NO: 303681 - DNA, 21 bp, Artificial sequence
  SiRNA target sequence
acatgttgctggtgcagcatg

SEQ ID NO: 303682 - DNA, 21 bp, Artificial sequence
  SiRNA target sequence
catgttgctggtgcagcatgt

SEQ ID NO: 303683 - DNA, 21 bp, Artificial sequence
  SiRNA target sequence
atgttgctggtgcagcatgtg

SEQ ID NO: 303684 - DNA, 21 bp, Artificial sequence
  SiRNA target sequence
tgttgctggtgcagcatgtgg

SEQ ID NO: 303685 - DNA, 21 bp, Artificial sequence
  SiRNA target sequence
gttgctggtgcagcatgtggt

SEQ ID NO: 303686 - DNA, 21 bp, Artificial sequence
  SiRNA target sequence
ttgctggtgcagcatgtggtc

SEQ ID NO: 303687 - DNA, 21 bp, Artificial sequence
  SiRNA target sequence
tgctggtgcagcatgtggtcg

SEQ ID NO: 303688 - DNA, 21 bp, Artificial sequence
  SiRNA target sequence
gctggtgcagcatgtggtcga

SEQ ID NO: 303689 - DNA, 21 bp, Artificial sequence
  SiRNA target sequence
ctggtgcagcatgtggtcgag

SEQ ID NO: 303690 - DNA, 21 bp, Artificial sequence
  SiRNA target sequence
tggtgcagcatgtggtcgagc

SEQ ID NO: 303691 - DNA, 21 bp, Artificial sequence
  SiRNA target sequence
ggtgcagcatgtggtcgagct

SEQ ID NO: 303692 - DNA, 21 bp, Artificial sequence
  SiRNA target sequence
gtgcagcatgtggtcgagctt

SEQ ID NO: 303693 - DNA, 21 bp, Artificial sequence
  SiRNA target sequence
tgcagcatgtggtcgagctta

SEQ ID NO: 303694 - DNA, 21 bp, Artificial sequence
  SiRNA target sequence
gcagcatgtggtcgagcttat

SEQ ID NO: 303695 - DNA, 21 bp, Artificial sequence
  SiRNA target sequence
cagcatgtggtcgagcttatg

SEQ ID NO: 303696 - DNA, 21 bp, Artificial sequence
  SiRNA target sequence
agcatgtggtcgagcttatgc

SEQ ID NO: 303697 - DNA, 21 bp, Artificial sequence
  SiRNA target sequence
gcatgtggtcgagcttatgca

SEQ ID NO: 303698 - DNA, 21 bp, Artificial sequence
  SiRNA target sequence
catgtggtcgagcttatgcag

SEQ ID NO: 303699 - DNA, 21 bp, Artificial sequence
  SiRNA target sequence
atgtggtcgagcttatgcaga

SEQ ID NO: 303700 - DNA, 21 bp, Artificial sequence
  SiRNA target sequence
tgtggtcgagcttatgcagaa

SEQ ID NO: 303701 - DNA, 21 bp, Artificial sequence
  SiRNA target sequence
gtggtcgagcttatgcagaat

SEQ ID NO: 303702 - DNA, 21 bp, Artificial sequence
  SiRNA target sequence
tggtcgagcttatgcagaatc

SEQ ID NO: 303703 - DNA, 21 bp, Artificial sequence
  SiRNA target sequence
ggtcgagcttatgcagaatct

SEQ ID NO: 303704 - DNA, 21 bp, Artificial sequence
  SiRNA target sequence
gtcgagcttatgcagaatcta

SEQ ID NO: 303705 - DNA, 21 bp, Artificial sequence
  SiRNA target sequence
tcgagcttatgcagaatctat

SEQ ID NO: 303706 - DNA, 21 bp, Artificial sequence
  SiRNA target sequence
cgagcttatgcagaatctata

SEQ ID NO: 303707 - DNA, 21 bp, Artificial sequence
  SiRNA target sequence
gagcttatgcagaatctataa

SEQ ID NO: 303708 - DNA, 21 bp, Artificial sequence
  SiRNA target sequence
agcttatgcagaatctataac

SEQ ID NO: 303709 - DNA, 21 bp, Artificial sequence
  SiRNA target sequence
gcttatgcagaatctataacc

SEQ ID NO: 303710 - DNA, 21 bp, Artificial sequence
  SiRNA target sequence
cttatgcagaatctataaccc

SEQ ID NO: 303711 - DNA, 21 bp, Artificial sequence
  SiRNA target sequence
ttatgcagaatctataaccca

SEQ ID NO: 303712 - DNA, 21 bp, Artificial sequence
  SiRNA target sequence
tatgcagaatctataacccaa

SEQ ID NO: 303713 - DNA, 21 bp, Artificial sequence
  SiRNA target sequence
atgcagaatctataacccaaa

SEQ ID NO: 303714 - DNA, 21 bp, Artificial sequence
  SiRNA target sequence
tgcagaatctataacccaaaa

SEQ ID NO: 303715 - DNA, 21 bp, Artificial sequence
  SiRNA target sequence
gcagaatctataacccaaaaa

SEQ ID NO: 303716 - DNA, 21 bp, Artificial sequence
  SiRNA target sequence
cagaatctataacccaaaaag

SEQ ID NO: 303717 - DNA, 21 bp, Artificial sequence
  SiRNA target sequence
agaatctataacccaaaaaga

SEQ ID NO: 303718 - DNA, 21 bp, Artificial sequence
  SiRNA target sequence
gaatctataacccaaaaagat

SEQ ID NO: 303719 - DNA, 21 bp, Artificial sequence
  SiRNA target sequence
aatctataacccaaaaagatt

SEQ ID NO: 303720 - DNA, 21 bp, Artificial sequence
  SiRNA target sequence
atctataacccaaaaagattt

SEQ ID NO: 303721 - DNA, 21 bp, Artificial sequence
  SiRNA target sequence
tctataacccaaaaagatttg

SEQ ID NO: 303722 - DNA, 21 bp, Artificial sequence
  SiRNA target sequence
ctataacccaaaaagatttgg

SEQ ID NO: 303723 - DNA, 21 bp, Artificial sequence
  SiRNA target sequence
tataacccaaaaagatttgga

SEQ ID NO: 303724 - DNA, 21 bp, Artificial sequence
  SiRNA target sequence
ataacccaaaaagatttggag

SEQ ID NO: 303725 - DNA, 21 bp, Artificial sequence
  SiRNA target sequence
taacccaaaaagatttggagc

SEQ ID NO: 303726 - DNA, 21 bp, Artificial sequence
  SiRNA target sequence
aacccaaaaagatttggagcg

SEQ ID NO: 303727 - DNA, 21 bp, Artificial sequence
  SiRNA target sequence
acccaaaaagatttggagcgt

SEQ ID NO: 303728 - DNA, 21 bp, Artificial sequence
  SiRNA target sequence
cccaaaaagatttggagcgta

SEQ ID NO: 303729 - DNA, 21 bp, Artificial sequence
  SiRNA target sequence
ccaaaaagatttggagcgtac

SEQ ID NO: 303730 - DNA, 21 bp, Artificial sequence
  SiRNA target sequence
caaaaagatttggagcgtaca

SEQ ID NO: 303731 - DNA, 21 bp, Artificial sequence
  SiRNA target sequence
aaaaagatttggagcgtacat

SEQ ID NO: 303732 - DNA, 21 bp, Artificial sequence
  SiRNA target sequence
aaaagatttggagcgtacatt

SEQ ID NO: 303733 - DNA, 21 bp, Artificial sequence
  SiRNA target sequence
aaagatttggagcgtacattt

SEQ ID NO: 303734 - DNA, 21 bp, Artificial sequence
  SiRNA target sequence
aagatttggagcgtacattta

SEQ ID NO: 303735 - DNA, 21 bp, Artificial sequence
  SiRNA target sequence
agatttggagcgtacatttag

SEQ ID NO: 303736 - DNA, 21 bp, Artificial sequence
  SiRNA target sequence
gatttggagcgtacatttagt

SEQ ID NO: 303737 - DNA, 21 bp, Artificial sequence
  SiRNA target sequence
atttggagcgtacatttagta

SEQ ID NO: 303738 - DNA, 21 bp, Artificial sequence
  SiRNA target sequence
tttggagcgtacatttagtaa

SEQ ID NO: 303739 - DNA, 21 bp, Artificial sequence
  SiRNA target sequence
ttggagcgtacatttagtaaa

SEQ ID NO: 303740 - DNA, 21 bp, Artificial sequence
  SiRNA target sequence
tggagcgtacatttagtaaaa

SEQ ID NO: 303741 - DNA, 21 bp, Artificial sequence
  SiRNA target sequence
ggagcgtacatttagtaaaat

SEQ ID NO: 303742 - DNA, 21 bp, Artificial sequence
  SiRNA target sequence
gagcgtacatttagtaaaata

SEQ ID NO: 303743 - DNA, 21 bp, Artificial sequence
  SiRNA target sequence
agcgtacatttagtaaaatag

SEQ ID NO: 303744 - DNA, 21 bp, Artificial sequence
  SiRNA target sequence
gcgtacatttagtaaaataga

SEQ ID NO: 303745 - DNA, 21 bp, Artificial sequence
  SiRNA target sequence
cgtacatttagtaaaatagat

SEQ ID NO: 303746 - DNA, 21 bp, Artificial sequence
  SiRNA target sequence
gtacatttagtaaaatagatg

SEQ ID NO: 303747 - DNA, 21 bp, Artificial sequence
  SiRNA target sequence
tacatttagtaaaatagatgt

SEQ ID NO: 303748 - DNA, 21 bp, Artificial sequence
  SiRNA target sequence
acatttagtaaaatagatgtt

SEQ ID NO: 303749 - DNA, 21 bp, Artificial sequence
  SiRNA target sequence
catttagtaaaatagatgtta

SEQ ID NO: 303750 - DNA, 21 bp, Artificial sequence
  SiRNA target sequence
atttagtaaaatagatgttac

SEQ ID NO: 303751 - DNA, 21 bp, Artificial sequence
  SiRNA target sequence
tttagtaaaatagatgttacg

SEQ ID NO: 303752 - DNA, 21 bp, Artificial sequence
  SiRNA target sequence
ttagtaaaatagatgttacga

SEQ ID NO: 303753 - DNA, 21 bp, Artificial sequence
  SiRNA target sequence
tagtaaaatagatgttacgat

SEQ ID NO: 303754 - DNA, 21 bp, Artificial sequence
  SiRNA target sequence
agtaaaatagatgttacgatg

SEQ ID NO: 303755 - DNA, 21 bp, Artificial sequence
  SiRNA target sequence
gtaaaatagatgttacgatgc

SEQ ID NO: 303756 - DNA, 21 bp, Artificial sequence
  SiRNA target sequence
taaaatagatgttacgatgca

SEQ ID NO: 303757 - DNA, 21 bp, Artificial sequence
  SiRNA target sequence
aaaatagatgttacgatgcaa

SEQ ID NO: 303758 - DNA, 21 bp, Artificial sequence
  SiRNA target sequence
aaatagatgttacgatgcaaa

SEQ ID NO: 303759 - DNA, 21 bp, Artificial sequence
  SiRNA target sequence
aatagatgttacgatgcaaat

SEQ ID NO: 303760 - DNA, 21 bp, Artificial sequence
  SiRNA target sequence
atagatgttacgatgcaaatc

SEQ ID NO: 303761 - DNA, 21 bp, Artificial sequence
  SiRNA target sequence
tagatgttacgatgcaaatcc

SEQ ID NO: 303762 - DNA, 21 bp, Artificial sequence
  SiRNA target sequence
agatgttacgatgcaaatcca

SEQ ID NO: 303763 - DNA, 21 bp, Artificial sequence
  SiRNA target sequence
gatgttacgatgcaaatccaa

SEQ ID NO: 303764 - DNA, 21 bp, Artificial sequence
  SiRNA target sequence
atgttacgatgcaaatccaat

SEQ ID NO: 303765 - DNA, 21 bp, Artificial sequence
  SiRNA target sequence
tgttacgatgcaaatccaatt

SEQ ID NO: 303766 - DNA, 21 bp, Artificial sequence
  SiRNA target sequence
gttacgatgcaaatccaattg

SEQ ID NO: 303767 - DNA, 21 bp, Artificial sequence
  SiRNA target sequence
ttacgatgcaaatccaattgg

SEQ ID NO: 303768 - DNA, 21 bp, Artificial sequence
  SiRNA target sequence
tacgatgcaaatccaattgga

SEQ ID NO: 303769 - DNA, 21 bp, Artificial sequence
  SiRNA target sequence
acgatgcaaatccaattggat

SEQ ID NO: 303770 - DNA, 21 bp, Artificial sequence
  SiRNA target sequence
cgatgcaaatccaattggatt

SEQ ID NO: 303771 - DNA, 21 bp, Artificial sequence
  SiRNA target sequence
gatgcaaatccaattggattt

SEQ ID NO: 303772 - DNA, 21 bp, Artificial sequence
  SiRNA target sequence
atgcaaatccaattggattta

SEQ ID NO: 303773 - DNA, 21 bp, Artificial sequence
  SiRNA target sequence
tgcaaatccaattggatttag

SEQ ID NO: 303774 - DNA, 21 bp, Artificial sequence
  SiRNA target sequence
gcaaatccaattggatttaga

SEQ ID NO: 303775 - DNA, 21 bp, Artificial sequence
  SiRNA target sequence
caaatccaattggatttagat

SEQ ID NO: 303776 - DNA, 21 bp, Artificial sequence
  SiRNA target sequence
aaatccaattggatttagatt

SEQ ID NO: 303777 - DNA, 21 bp, Artificial sequence
  SiRNA target sequence
aatccaattggatttagattc

SEQ ID NO: 303778 - DNA, 21 bp, Artificial sequence
  SiRNA target sequence
atccaattggatttagattct

SEQ ID NO: 303779 - DNA, 21 bp, Artificial sequence
  SiRNA target sequence
tccaattggatttagattctt

SEQ ID NO: 303780 - DNA, 21 bp, Artificial sequence
  SiRNA target sequence
ccaattggatttagattcttc

SEQ ID NO: 303781 - DNA, 21 bp, Artificial sequence
  SiRNA target sequence
caattggatttagattcttca

SEQ ID NO: 303782 - DNA, 21 bp, Artificial sequence
  SiRNA target sequence
aattggatttagattcttcat

SEQ ID NO: 303783 - DNA, 21 bp, Artificial sequence
  SiRNA target sequence
attggatttagattcttcatt

SEQ ID NO: 303784 - DNA, 21 bp, Artificial sequence
  SiRNA target sequence
ttggatttagattcttcatta

SEQ ID NO: 303785 - DNA, 21 bp, Artificial sequence
  SiRNA target sequence
tggatttagattcttcattag

SEQ ID NO: 303786 - DNA, 21 bp, Artificial sequence
  SiRNA target sequence
ggatttagattcttcattaga

SEQ ID NO: 303787 - DNA, 21 bp, Artificial sequence
  SiRNA target sequence
gatttagattcttcattagat

SEQ ID NO: 303788 - DNA, 21 bp, Artificial sequence
  SiRNA target sequence
atttagattcttcattagatt

SEQ ID NO: 303789 - DNA, 21 bp, Artificial sequence
  SiRNA target sequence
tttagattcttcattagattt

SEQ ID NO: 303790 - DNA, 21 bp, Artificial sequence
  SiRNA target sequence
ttagattcttcattagatttt

SEQ ID NO: 303791 - DNA, 21 bp, Artificial sequence
  SiRNA target sequence
tagattcttcattagattttt

SEQ ID NO: 303792 - DNA, 21 bp, Artificial sequence
  SiRNA target sequence
agattcttcattagatttttc

SEQ ID NO: 303793 - DNA, 21 bp, Artificial sequence
  SiRNA target sequence
gattcttcattagatttttct

SEQ ID NO: 303794 - DNA, 21 bp, Artificial sequence
  SiRNA target sequence
attcttcattagatttttcta

SEQ ID NO: 303795 - DNA, 21 bp, Artificial sequence
  SiRNA target sequence
ttcttcattagatttttctag

SEQ ID NO: 303796 - DNA, 21 bp, Artificial sequence
  SiRNA target sequence
tcttcattagatttttctaga

SEQ ID NO: 303797 - DNA, 21 bp, Artificial sequence
  SiRNA target sequence
cttcattagatttttctagaa

SEQ ID NO: 303798 - DNA, 21 bp, Artificial sequence
  SiRNA target sequence
ttcattagatttttctagaac

SEQ ID NO: 303799 - DNA, 21 bp, Artificial sequence
  SiRNA target sequence
tcattagatttttctagaacc

SEQ ID NO: 303800 - DNA, 21 bp, Artificial sequence
  SiRNA target sequence
cattagatttttctagaaccg

SEQ ID NO: 303801 - DNA, 21 bp, Artificial sequence
  SiRNA target sequence
attagatttttctagaaccga

SEQ ID NO: 303802 - DNA, 21 bp, Artificial sequence
  SiRNA target sequence
ttagatttttctagaaccgaa

SEQ ID NO: 303803 - DNA, 21 bp, Artificial sequence
  SiRNA target sequence
tagatttttctagaaccgaac

SEQ ID NO: 303804 - DNA, 21 bp, Artificial sequence
  SiRNA target sequence
agatttttctagaaccgaacc

SEQ ID NO: 303805 - DNA, 21 bp, Artificial sequence
  SiRNA target sequence
gatttttctagaaccgaaccc

SEQ ID NO: 303806 - DNA, 21 bp, Artificial sequence
  SiRNA target sequence
atttttctagaaccgaaccca

SEQ ID NO: 303807 - DNA, 21 bp, Artificial sequence
  SiRNA target sequence
tttttctagaaccgaacccaa

SEQ ID NO: 303808 - DNA, 21 bp, Artificial sequence
  SiRNA target sequence
ttttctagaaccgaacccaaa

SEQ ID NO: 303809 - DNA, 21 bp, Artificial sequence
  SiRNA target sequence
tttctagaaccgaacccaaaa

SEQ ID NO: 303810 - DNA, 21 bp, Artificial sequence
  SiRNA target sequence
ttctagaaccgaacccaaaat

SEQ ID NO: 303811 - DNA, 21 bp, Artificial sequence
  SiRNA target sequence
tctagaaccgaacccaaaatt

SEQ ID NO: 303812 - DNA, 21 bp, Artificial sequence
  SiRNA target sequence
ctagaaccgaacccaaaattc

SEQ ID NO: 303813 - DNA, 21 bp, Artificial sequence
  SiRNA target sequence
tagaaccgaacccaaaattcc

SEQ ID NO: 303814 - DNA, 21 bp, Artificial sequence
  SiRNA target sequence
agaaccgaacccaaaattcct

SEQ ID NO: 303815 - DNA, 21 bp, Artificial sequence
  SiRNA target sequence
gaaccgaacccaaaattcctg

SEQ ID NO: 303816 - DNA, 21 bp, Artificial sequence
  SiRNA target sequence
aaccgaacccaaaattcctgc

SEQ ID NO: 303817 - DNA, 21 bp, Artificial sequence
  SiRNA target sequence
accgaacccaaaattcctgct

SEQ ID NO: 303818 - DNA, 21 bp, Artificial sequence
  SiRNA target sequence
ccgaacccaaaattcctgctg

SEQ ID NO: 303819 - DNA, 21 bp, Artificial sequence
  SiRNA target sequence
cgaacccaaaattcctgctgg

SEQ ID NO: 303820 - DNA, 21 bp, Artificial sequence
  SiRNA target sequence
gaacccaaaattcctgctgga

SEQ ID NO: 303821 - DNA, 21 bp, Artificial sequence
  SiRNA target sequence
aacccaaaattcctgctggag

SEQ ID NO: 303822 - DNA, 21 bp, Artificial sequence
  SiRNA target sequence
acccaaaattcctgctggagt

SEQ ID NO: 303823 - DNA, 21 bp, Artificial sequence
  SiRNA target sequence
cccaaaattcctgctggagtc

SEQ ID NO: 303824 - DNA, 21 bp, Artificial sequence
  SiRNA target sequence
ccaaaattcctgctggagtcg

SEQ ID NO: 303825 - DNA, 21 bp, Artificial sequence
  SiRNA target sequence
caaaattcctgctggagtcga

SEQ ID NO: 303826 - DNA, 21 bp, Artificial sequence
  SiRNA target sequence
aaaattcctgctggagtcgaa

SEQ ID NO: 303827 - DNA, 21 bp, Artificial sequence
  SiRNA target sequence
aaattcctgctggagtcgaat

SEQ ID NO: 303828 - DNA, 21 bp, Artificial sequence
  SiRNA target sequence
aattcctgctggagtcgaatt

SEQ ID NO: 303829 - DNA, 21 bp, Artificial sequence
  SiRNA target sequence
attcctgctggagtcgaattt

SEQ ID NO: 303830 - DNA, 21 bp, Artificial sequence
  SiRNA target sequence
ttcctgctggagtcgaatttg

SEQ ID NO: 303831 - DNA, 21 bp, Artificial sequence
  SiRNA target sequence
tcctgctggagtcgaatttgg

SEQ ID NO: 303832 - DNA, 21 bp, Artificial sequence
  SiRNA target sequence
cctgctggagtcgaatttgga

SEQ ID NO: 303833 - DNA, 21 bp, Artificial sequence
  SiRNA target sequence
ctgctggagtcgaatttggac

SEQ ID NO: 303834 - DNA, 21 bp, Artificial sequence
  SiRNA target sequence
tgctggagtcgaatttggacc

SEQ ID NO: 303835 - DNA, 21 bp, Artificial sequence
  SiRNA target sequence
gctggagtcgaatttggaccg

SEQ ID NO: 303836 - DNA, 21 bp, Artificial sequence
  SiRNA target sequence
ctggagtcgaatttggaccgg

SEQ ID NO: 303837 - DNA, 21 bp, Artificial sequence
  SiRNA target sequence
tggagtcgaatttggaccgga

SEQ ID NO: 303838 - DNA, 21 bp, Artificial sequence
  SiRNA target sequence
ggagtcgaatttggaccggaa

SEQ ID NO: 303839 - DNA, 21 bp, Artificial sequence
  SiRNA target sequence
gagtcgaatttggaccggaag

SEQ ID NO: 303840 - DNA, 21 bp, Artificial sequence
  SiRNA target sequence
agtcgaatttggaccggaagc

SEQ ID NO: 303841 - DNA, 21 bp, Artificial sequence
  SiRNA target sequence
gtcgaatttggaccggaagct

SEQ ID NO: 303842 - DNA, 21 bp, Artificial sequence
  SiRNA target sequence
tcgaatttggaccggaagctc

SEQ ID NO: 303843 - DNA, 21 bp, Artificial sequence
  SiRNA target sequence
cgaatttggaccggaagctct

SEQ ID NO: 303844 - DNA, 21 bp, Artificial sequence
  SiRNA target sequence
gaatttggaccggaagctctc

SEQ ID NO: 303845 - DNA, 21 bp, Artificial sequence
  SiRNA target sequence
aatttggaccggaagctctca

SEQ ID NO: 303846 - DNA, 21 bp, Artificial sequence
  SiRNA target sequence
atttggaccggaagctctcac

SEQ ID NO: 303847 - DNA, 21 bp, Artificial sequence
  SiRNA target sequence
tttggaccggaagctctcact

SEQ ID NO: 303848 - DNA, 21 bp, Artificial sequence
  SiRNA target sequence
ttggaccggaagctctcactt

SEQ ID NO: 303849 - DNA, 21 bp, Artificial sequence
  SiRNA target sequence
tggaccggaagctctcacttt

SEQ ID NO: 303850 - DNA, 21 bp, Artificial sequence
  SiRNA target sequence
ggaccggaagctctcactttt

SEQ ID NO: 303851 - DNA, 21 bp, Artificial sequence
  SiRNA target sequence
gaccggaagctctcacttttt

SEQ ID NO: 303852 - DNA, 21 bp, Artificial sequence
  SiRNA target sequence
accggaagctctcactttttg

SEQ ID NO: 303853 - DNA, 21 bp, Artificial sequence
  SiRNA target sequence
ccggaagctctcactttttgt

SEQ ID NO: 303854 - DNA, 21 bp, Artificial sequence
  SiRNA target sequence
cggaagctctcactttttgtg

SEQ ID NO: 303855 - DNA, 21 bp, Artificial sequence
  SiRNA target sequence
ggaagctctcactttttgtga

SEQ ID NO: 303856 - DNA, 21 bp, Artificial sequence
  SiRNA target sequence
gaagctctcactttttgtgat

SEQ ID NO: 303857 - DNA, 21 bp, Artificial sequence
  SiRNA target sequence
aagctctcactttttgtgatc

SEQ ID NO: 303858 - DNA, 21 bp, Artificial sequence
  SiRNA target sequence
agctctcactttttgtgatct

SEQ ID NO: 303859 - DNA, 21 bp, Artificial sequence
  SiRNA target sequence
gctctcactttttgtgatctt

SEQ ID NO: 303860 - DNA, 21 bp, Artificial sequence
  SiRNA target sequence
ctctcactttttgtgatcttc

SEQ ID NO: 303861 - DNA, 21 bp, Artificial sequence
  SiRNA target sequence
tctcactttttgtgatcttcc

SEQ ID NO: 303862 - DNA, 21 bp, Artificial sequence
  SiRNA target sequence
ctcactttttgtgatcttcca

SEQ ID NO: 303863 - DNA, 21 bp, Artificial sequence
  SiRNA target sequence
tcactttttgtgatcttccag

SEQ ID NO: 303864 - DNA, 21 bp, Artificial sequence
  SiRNA target sequence
cactttttgtgatcttccagc

SEQ ID NO: 303865 - DNA, 21 bp, Artificial sequence
  SiRNA target sequence
actttttgtgatcttccagcc

SEQ ID NO: 303866 - DNA, 21 bp, Artificial sequence
  SiRNA target sequence
ctttttgtgatcttccagccc

SEQ ID NO: 303867 - DNA, 21 bp, Artificial sequence
  SiRNA target sequence
tttttgtgatcttccagccct

SEQ ID NO: 303868 - DNA, 21 bp, Artificial sequence
  SiRNA target sequence
ttttgtgatcttccagccctt

SEQ ID NO: 303869 - DNA, 21 bp, Artificial sequence
  SiRNA target sequence
tttgtgatcttccagccctta

SEQ ID NO: 303870 - DNA, 21 bp, Artificial sequence
  SiRNA target sequence
ttgtgatcttccagcccttaa

SEQ ID NO: 303871 - DNA, 21 bp, Artificial sequence
  SiRNA target sequence
tgtgatcttccagcccttaag

SEQ ID NO: 303872 - DNA, 21 bp, Artificial sequence
  SiRNA target sequence
gtgatcttccagcccttaaga

SEQ ID NO: 303873 - DNA, 21 bp, Artificial sequence
  SiRNA target sequence
tgatcttccagcccttaagat

SEQ ID NO: 303874 - DNA, 21 bp, Artificial sequence
  SiRNA target sequence
gatcttccagcccttaagatg

SEQ ID NO: 303875 - DNA, 21 bp, Artificial sequence
  SiRNA target sequence
atcttccagcccttaagatga

SEQ ID NO: 303876 - DNA, 21 bp, Artificial sequence
  SiRNA target sequence
tcttccagcccttaagatgat

SEQ ID NO: 303877 - DNA, 21 bp, Artificial sequence
  SiRNA target sequence
cttccagcccttaagatgata

SEQ ID NO: 303878 - DNA, 21 bp, Artificial sequence
  SiRNA target sequence
ttccagcccttaagatgatac

SEQ ID NO: 303879 - DNA, 21 bp, Artificial sequence
  SiRNA target sequence
tccagcccttaagatgatacc

SEQ ID NO: 303880 - DNA, 21 bp, Artificial sequence
  SiRNA target sequence
ccagcccttaagatgatacca

SEQ ID NO: 303881 - DNA, 21 bp, Artificial sequence
  SiRNA target sequence
cagcccttaagatgataccag

SEQ ID NO: 303882 - DNA, 21 bp, Artificial sequence
  SiRNA target sequence
agcccttaagatgataccagt

SEQ ID NO: 303883 - DNA, 21 bp, Artificial sequence
  SiRNA target sequence
gcccttaagatgataccagta

SEQ ID NO: 303884 - DNA, 21 bp, Artificial sequence
  SiRNA target sequence
cccttaagatgataccagtag

SEQ ID NO: 303885 - DNA, 21 bp, Artificial sequence
  SiRNA target sequence
ccttaagatgataccagtagg

SEQ ID NO: 303886 - DNA, 21 bp, Artificial sequence
  SiRNA target sequence
cttaagatgataccagtagga

SEQ ID NO: 303887 - DNA, 21 bp, Artificial sequence
  SiRNA target sequence
ttaagatgataccagtaggac

SEQ ID NO: 303888 - DNA, 21 bp, Artificial sequence
  SiRNA target sequence
taagatgataccagtaggacg

SEQ ID NO: 303889 - DNA, 21 bp, Artificial sequence
  SiRNA target sequence
aagatgataccagtaggacga

SEQ ID NO: 303890 - DNA, 21 bp, Artificial sequence
  SiRNA target sequence
agatgataccagtaggacgac

SEQ ID NO: 303891 - DNA, 21 bp, Artificial sequence
  SiRNA target sequence
gatgataccagtaggacgact

SEQ ID NO: 303892 - DNA, 21 bp, Artificial sequence
  SiRNA target sequence
atgataccagtaggacgactt

SEQ ID NO: 303893 - DNA, 21 bp, Artificial sequence
  SiRNA target sequence
tgataccagtaggacgacttc

SEQ ID NO: 303894 - DNA, 21 bp, Artificial sequence
  SiRNA target sequence
gataccagtaggacgacttcc

SEQ ID NO: 303895 - DNA, 21 bp, Artificial sequence
  SiRNA target sequence
ataccagtaggacgacttccc

SEQ ID NO: 303896 - DNA, 21 bp, Artificial sequence
  SiRNA target sequence
taccagtaggacgacttcccg

SEQ ID NO: 303897 - DNA, 21 bp, Artificial sequence
  SiRNA target sequence
accagtaggacgacttcccga

SEQ ID NO: 303898 - DNA, 21 bp, Artificial sequence
  SiRNA target sequence
ccagtaggacgacttcccgaa

SEQ ID NO: 303899 - DNA, 21 bp, Artificial sequence
  SiRNA target sequence
cagtaggacgacttcccgaac

SEQ ID NO: 303900 - DNA, 21 bp, Artificial sequence
  SiRNA target sequence
agtaggacgacttcccgaacc

SEQ ID NO: 303901 - DNA, 21 bp, Artificial sequence
  SiRNA target sequence
gtaggacgacttcccgaaccc

SEQ ID NO: 303902 - DNA, 21 bp, Artificial sequence
  SiRNA target sequence
taggacgacttcccgaacccc

SEQ ID NO: 303903 - DNA, 21 bp, Artificial sequence
  SiRNA target sequence
aggacgacttcccgaacccct

SEQ ID NO: 303904 - DNA, 21 bp, Artificial sequence
  SiRNA target sequence
ggacgacttcccgaaccccta

SEQ ID NO: 303905 - DNA, 21 bp, Artificial sequence
  SiRNA target sequence
gacgacttcccgaacccctat

SEQ ID NO: 303906 - DNA, 21 bp, Artificial sequence
  SiRNA target sequence
acgacttcccgaacccctatt

SEQ ID NO: 303907 - DNA, 21 bp, Artificial sequence
  SiRNA target sequence
cgacttcccgaacccctattt

SEQ ID NO: 303908 - DNA, 21 bp, Artificial sequence
  SiRNA target sequence
gacttcccgaacccctatttg

SEQ ID NO: 303909 - DNA, 21 bp, Artificial sequence
  SiRNA target sequence
acttcccgaacccctatttga

SEQ ID NO: 303910 - DNA, 21 bp, Artificial sequence
  SiRNA target sequence
cttcccgaacccctatttgaa

SEQ ID NO: 303911 - DNA, 21 bp, Artificial sequence
  SiRNA target sequence
ttcccgaacccctatttgaac

SEQ ID NO: 303912 - DNA, 21 bp, Artificial sequence
  SiRNA target sequence
tcccgaacccctatttgaacc

SEQ ID NO: 303913 - DNA, 21 bp, Artificial sequence
  SiRNA target sequence
cccgaacccctatttgaacca

SEQ ID NO: 303914 - DNA, 21 bp, Artificial sequence
  SiRNA target sequence
ccgaacccctatttgaaccag

SEQ ID NO: 303915 - DNA, 21 bp, Artificial sequence
  SiRNA target sequence
cgaacccctatttgaaccagg

SEQ ID NO: 303916 - DNA, 21 bp, Artificial sequence
  SiRNA target sequence
gaacccctatttgaaccaggc

SEQ ID NO: 303917 - DNA, 21 bp, Artificial sequence
  SiRNA target sequence
aacccctatttgaaccaggca

SEQ ID NO: 303918 - DNA, 21 bp, Artificial sequence
  SiRNA target sequence
acccctatttgaaccaggcaa

SEQ ID NO: 303919 - DNA, 21 bp, Artificial sequence
  SiRNA target sequence
cccctatttgaaccaggcaaa

SEQ ID NO: 303920 - DNA, 21 bp, Artificial sequence
  SiRNA target sequence
ccctatttgaaccaggcaaaa

SEQ ID NO: 303921 - DNA, 21 bp, Artificial sequence
  SiRNA target sequence
cctatttgaaccaggcaaaac

SEQ ID NO: 303922 - DNA, 21 bp, Artificial sequence
  SiRNA target sequence
ctatttgaaccaggcaaaaca

SEQ ID NO: 303923 - DNA, 21 bp, Artificial sequence
  SiRNA target sequence
tatttgaaccaggcaaaacag

SEQ ID NO: 303924 - DNA, 21 bp, Artificial sequence
  SiRNA target sequence
atttgaaccaggcaaaacaga

SEQ ID NO: 303925 - DNA, 21 bp, Artificial sequence
  SiRNA target sequence
tttgaaccaggcaaaacagat

SEQ ID NO: 303926 - DNA, 21 bp, Artificial sequence
  SiRNA target sequence
ttgaaccaggcaaaacagata

SEQ ID NO: 303927 - DNA, 21 bp, Artificial sequence
  SiRNA target sequence
tgaaccaggcaaaacagatat

SEQ ID NO: 303928 - DNA, 21 bp, Artificial sequence
  SiRNA target sequence
gaaccaggcaaaacagatatt

SEQ ID NO: 303929 - DNA, 21 bp, Artificial sequence
  SiRNA target sequence
aaccaggcaaaacagatatta

SEQ ID NO: 303930 - DNA, 21 bp, Artificial sequence
  SiRNA target sequence
accaggcaaaacagatattag

SEQ ID NO: 303931 - DNA, 21 bp, Artificial sequence
  SiRNA target sequence
ccaggcaaaacagatattagg

SEQ ID NO: 303932 - DNA, 21 bp, Artificial sequence
  SiRNA target sequence
caggcaaaacagatattaggc

SEQ ID NO: 303933 - DNA, 21 bp, Artificial sequence
  SiRNA target sequence
aggcaaaacagatattaggcc

SEQ ID NO: 303934 - DNA, 21 bp, Artificial sequence
  SiRNA target sequence
ggcaaaacagatattaggcct

SEQ ID NO: 303935 - DNA, 21 bp, Artificial sequence
  SiRNA target sequence
gcaaaacagatattaggcctt

SEQ ID NO: 303936 - DNA, 21 bp, Artificial sequence
  SiRNA target sequence
caaaacagatattaggccttc

SEQ ID NO: 303937 - DNA, 21 bp, Artificial sequence
  SiRNA target sequence
aaaacagatattaggccttcc

SEQ ID NO: 303938 - DNA, 21 bp, Artificial sequence
  SiRNA target sequence
aaacagatattaggccttcct

SEQ ID NO: 303939 - DNA, 21 bp, Artificial sequence
  SiRNA target sequence
aacagatattaggccttcctt

SEQ ID NO: 303940 - DNA, 21 bp, Artificial sequence
  SiRNA target sequence
acagatattaggccttcctta

SEQ ID NO: 303941 - DNA, 21 bp, Artificial sequence
  SiRNA target sequence
cagatattaggccttccttag

SEQ ID NO: 303942 - DNA, 21 bp, Artificial sequence
  SiRNA target sequence
agatattaggccttccttagt

SEQ ID NO: 303943 - DNA, 21 bp, Artificial sequence
  SiRNA target sequence
gatattaggccttccttagta

SEQ ID NO: 303944 - DNA, 21 bp, Artificial sequence
  SiRNA target sequence
atattaggccttccttagtac

SEQ ID NO: 303945 - DNA, 21 bp, Artificial sequence
  SiRNA target sequence
tattaggccttccttagtaca

SEQ ID NO: 303946 - DNA, 21 bp, Artificial sequence
  SiRNA target sequence
attaggccttccttagtacat

SEQ ID NO: 303947 - DNA, 21 bp, Artificial sequence
  SiRNA target sequence
ttaggccttccttagtacatg

SEQ ID NO: 303948 - DNA, 21 bp, Artificial sequence
  SiRNA target sequence
taggccttccttagtacatgg

SEQ ID NO: 303949 - DNA, 21 bp, Artificial sequence
  SiRNA target sequence
aggccttccttagtacatgga

SEQ ID NO: 303950 - DNA, 21 bp, Artificial sequence
  SiRNA target sequence
ggccttccttagtacatggaa

SEQ ID NO: 303951 - DNA, 21 bp, Artificial sequence
  SiRNA target sequence
gccttccttagtacatggaat

SEQ ID NO: 303952 - DNA, 21 bp, Artificial sequence
  SiRNA target sequence
ccttccttagtacatggaatg

SEQ ID NO: 303953 - DNA, 21 bp, Artificial sequence
  SiRNA target sequence
cttccttagtacatggaatga

SEQ ID NO: 303954 - DNA, 21 bp, Artificial sequence
  SiRNA target sequence
ttccttagtacatggaatgat

SEQ ID NO: 303955 - DNA, 21 bp, Artificial sequence
  SiRNA target sequence
tccttagtacatggaatgatt

SEQ ID NO: 303956 - DNA, 21 bp, Artificial sequence
  SiRNA target sequence
ccttagtacatggaatgattt

SEQ ID NO: 303957 - DNA, 21 bp, Artificial sequence
  SiRNA target sequence
cttagtacatggaatgatttc

SEQ ID NO: 303958 - DNA, 21 bp, Artificial sequence
  SiRNA target sequence
ttagtacatggaatgatttct

SEQ ID NO: 303959 - DNA, 21 bp, Artificial sequence
  SiRNA target sequence
tagtacatggaatgatttctg

SEQ ID NO: 303960 - DNA, 21 bp, Artificial sequence
  SiRNA target sequence
agtacatggaatgatttctga

SEQ ID NO: 303961 - DNA, 21 bp, Artificial sequence
  SiRNA target sequence
gtacatggaatgatttctgat

SEQ ID NO: 303962 - DNA, 21 bp, Artificial sequence
  SiRNA target sequence
tacatggaatgatttctgata

SEQ ID NO: 303963 - DNA, 21 bp, Artificial sequence
  SiRNA target sequence
acatggaatgatttctgatat

SEQ ID NO: 303964 - DNA, 21 bp, Artificial sequence
  SiRNA target sequence
catggaatgatttctgatatt

SEQ ID NO: 303965 - DNA, 21 bp, Artificial sequence
  SiRNA target sequence
atggaatgatttctgatatta

SEQ ID NO: 303966 - DNA, 21 bp, Artificial sequence
  SiRNA target sequence
tggaatgatttctgatattaa

SEQ ID NO: 303967 - DNA, 21 bp, Artificial sequence
  SiRNA target sequence
ggaatgatttctgatattaag

SEQ ID NO: 303968 - DNA, 21 bp, Artificial sequence
  SiRNA target sequence
gaatgatttctgatattaaga

SEQ ID NO: 303969 - DNA, 21 bp, Artificial sequence
  SiRNA target sequence
aatgatttctgatattaagac

SEQ ID NO: 303970 - DNA, 21 bp, Artificial sequence
  SiRNA target sequence
atgatttctgatattaagact

SEQ ID NO: 303971 - DNA, 21 bp, Artificial sequence
  SiRNA target sequence
tgatttctgatattaagacta

SEQ ID NO: 303972 - DNA, 21 bp, Artificial sequence
  SiRNA target sequence
gatttctgatattaagactaa

SEQ ID NO: 303973 - DNA, 21 bp, Artificial sequence
  SiRNA target sequence
atttctgatattaagactaaa

SEQ ID NO: 303974 - DNA, 21 bp, Artificial sequence
  SiRNA target sequence
tttctgatattaagactaaac

SEQ ID NO: 303975 - DNA, 21 bp, Artificial sequence
  SiRNA target sequence
ttctgatattaagactaaacc

SEQ ID NO: 303976 - DNA, 21 bp, Artificial sequence
  SiRNA target sequence
tctgatattaagactaaacca

SEQ ID NO: 303977 - DNA, 21 bp, Artificial sequence
  SiRNA target sequence
ctgatattaagactaaaccag

SEQ ID NO: 303978 - DNA, 21 bp, Artificial sequence
  SiRNA target sequence
tgatattaagactaaaccagc

SEQ ID NO: 303979 - DNA, 21 bp, Artificial sequence
  SiRNA target sequence
gatattaagactaaaccagct

SEQ ID NO: 303980 - DNA, 21 bp, Artificial sequence
  SiRNA target sequence
atattaagactaaaccagctt

SEQ ID NO: 303981 - DNA, 21 bp, Artificial sequence
  SiRNA target sequence
tattaagactaaaccagctta

SEQ ID NO: 303982 - DNA, 21 bp, Artificial sequence
  SiRNA target sequence
attaagactaaaccagcttac

SEQ ID NO: 303983 - DNA, 21 bp, Artificial sequence
  SiRNA target sequence
ttaagactaaaccagcttact

SEQ ID NO: 303984 - DNA, 21 bp, Artificial sequence
  SiRNA target sequence
taagactaaaccagcttactt

SEQ ID NO: 303985 - DNA, 21 bp, Artificial sequence
  SiRNA target sequence
aagactaaaccagcttactta

SEQ ID NO: 303986 - DNA, 21 bp, Artificial sequence
  SiRNA target sequence
agactaaaccagcttacttac

SEQ ID NO: 303987 - DNA, 21 bp, Artificial sequence
  SiRNA target sequence
gactaaaccagcttacttacg

SEQ ID NO: 303988 - DNA, 21 bp, Artificial sequence
  SiRNA target sequence
actaaaccagcttacttacgt

SEQ ID NO: 303989 - DNA, 21 bp, Artificial sequence
  SiRNA target sequence
ctaaaccagcttacttacgta

SEQ ID NO: 303990 - DNA, 21 bp, Artificial sequence
  SiRNA target sequence
taaaccagcttacttacgtaa

SEQ ID NO: 303991 - DNA, 21 bp, Artificial sequence
  SiRNA target sequence
aaaccagcttacttacgtaat

SEQ ID NO: 303992 - DNA, 21 bp, Artificial sequence
  SiRNA target sequence
aaccagcttacttacgtaatg

SEQ ID NO: 303993 - DNA, 21 bp, Artificial sequence
  SiRNA target sequence
accagcttacttacgtaatgt

SEQ ID NO: 303994 - DNA, 21 bp, Artificial sequence
  SiRNA target sequence
ccagcttacttacgtaatgta

SEQ ID NO: 303995 - DNA, 21 bp, Artificial sequence
  SiRNA target sequence
cagcttacttacgtaatgtaa

SEQ ID NO: 303996 - DNA, 21 bp, Artificial sequence
  SiRNA target sequence
agcttacttacgtaatgtaag

SEQ ID NO: 303997 - DNA, 21 bp, Artificial sequence
  SiRNA target sequence
gcttacttacgtaatgtaaga

SEQ ID NO: 303998 - DNA, 21 bp, Artificial sequence
  SiRNA target sequence
cttacttacgtaatgtaagag

SEQ ID NO: 303999 - DNA, 21 bp, Artificial sequence
  SiRNA target sequence
ttacttacgtaatgtaagagt

SEQ ID NO: 304000 - DNA, 21 bp, Artificial sequence
  SiRNA target sequence
tacttacgtaatgtaagagta

SEQ ID NO: 304001 - DNA, 21 bp, Artificial sequence
  SiRNA target sequence
acttacgtaatgtaagagtag

SEQ ID NO: 304002 - DNA, 21 bp, Artificial sequence
  SiRNA target sequence
cttacgtaatgtaagagtaga

SEQ ID NO: 304003 - DNA, 21 bp, Artificial sequence
  SiRNA target sequence
ttacgtaatgtaagagtagat

SEQ ID NO: 304004 - DNA, 21 bp, Artificial sequence
  SiRNA target sequence
tacgtaatgtaagagtagatg

SEQ ID NO: 304005 - DNA, 21 bp, Artificial sequence
  SiRNA target sequence
acgtaatgtaagagtagatgg

SEQ ID NO: 304006 - DNA, 21 bp, Artificial sequence
  SiRNA target sequence
cgtaatgtaagagtagatggt

SEQ ID NO: 304007 - DNA, 21 bp, Artificial sequence
  SiRNA target sequence
gtaatgtaagagtagatggtg

SEQ ID NO: 304008 - DNA, 21 bp, Artificial sequence
  SiRNA target sequence
taatgtaagagtagatggtga

SEQ ID NO: 304009 - DNA, 21 bp, Artificial sequence
  SiRNA target sequence
aatgtaagagtagatggtgaa

SEQ ID NO: 304010 - DNA, 21 bp, Artificial sequence
  SiRNA target sequence
atgtaagagtagatggtgaag

SEQ ID NO: 304011 - DNA, 21 bp, Artificial sequence
  SiRNA target sequence
tgtaagagtagatggtgaagt

SEQ ID NO: 304012 - DNA, 21 bp, Artificial sequence
  SiRNA target sequence
gtaagagtagatggtgaagtt

SEQ ID NO: 304013 - DNA, 21 bp, Artificial sequence
  SiRNA target sequence
taagagtagatggtgaagtta

SEQ ID NO: 304014 - DNA, 21 bp, Artificial sequence
  SiRNA target sequence
aagagtagatggtgaagttat

SEQ ID NO: 304015 - DNA, 21 bp, Artificial sequence
  SiRNA target sequence
agagtagatggtgaagttata

SEQ ID NO: 304016 - DNA, 21 bp, Artificial sequence
  SiRNA target sequence
gagtagatggtgaagttataa

SEQ ID NO: 304017 - DNA, 21 bp, Artificial sequence
  SiRNA target sequence
agtagatggtgaagttataaa

SEQ ID NO: 304018 - DNA, 21 bp, Artificial sequence
  SiRNA target sequence
gtagatggtgaagttataaat

SEQ ID NO: 304019 - DNA, 21 bp, Artificial sequence
  SiRNA target sequence
tagatggtgaagttataaata

SEQ ID NO: 304020 - DNA, 21 bp, Artificial sequence
  SiRNA target sequence
agatggtgaagttataaatat

SEQ ID NO: 304021 - DNA, 21 bp, Artificial sequence
  SiRNA target sequence
gatggtgaagttataaatatg

SEQ ID NO: 304022 - DNA, 21 bp, Artificial sequence
  SiRNA target sequence
atggtgaagttataaatatga

SEQ ID NO: 304023 - DNA, 21 bp, Artificial sequence
  SiRNA target sequence
tggtgaagttataaatatgaa

SEQ ID NO: 304024 - DNA, 21 bp, Artificial sequence
  SiRNA target sequence
ggtgaagttataaatatgaaa

SEQ ID NO: 304025 - DNA, 21 bp, Artificial sequence
  SiRNA target sequence
gtgaagttataaatatgaaac

SEQ ID NO: 304026 - DNA, 21 bp, Artificial sequence
  SiRNA target sequence
tgaagttataaatatgaaaca

SEQ ID NO: 304027 - DNA, 21 bp, Artificial sequence
  SiRNA target sequence
gaagttataaatatgaaacac

SEQ ID NO: 304028 - DNA, 21 bp, Artificial sequence
  SiRNA target sequence
aagttataaatatgaaacaca

SEQ ID NO: 304029 - DNA, 21 bp, Artificial sequence
  SiRNA target sequence
agttataaatatgaaacacag

SEQ ID NO: 304030 - DNA, 21 bp, Artificial sequence
  SiRNA target sequence
gttataaatatgaaacacaga

SEQ ID NO: 304031 - DNA, 21 bp, Artificial sequence
  SiRNA target sequence
ttataaatatgaaacacagaa

SEQ ID NO: 304032 - DNA, 21 bp, Artificial sequence
  SiRNA target sequence
tataaatatgaaacacagaaa

SEQ ID NO: 304033 - DNA, 21 bp, Artificial sequence
  SiRNA target sequence
ataaatatgaaacacagaaat

SEQ ID NO: 304034 - DNA, 21 bp, Artificial sequence
  SiRNA target sequence
taaatatgaaacacagaaatt

SEQ ID NO: 304035 - DNA, 21 bp, Artificial sequence
  SiRNA target sequence
aaatatgaaacacagaaattt

SEQ ID NO: 304036 - DNA, 21 bp, Artificial sequence
  SiRNA target sequence
aatatgaaacacagaaattta

SEQ ID NO: 304037 - DNA, 21 bp, Artificial sequence
  SiRNA target sequence
atatgaaacacagaaatttaa

SEQ ID NO: 304038 - DNA, 21 bp, Artificial sequence
  SiRNA target sequence
tatgaaacacagaaatttaat

SEQ ID NO: 304039 - DNA, 21 bp, Artificial sequence
  SiRNA target sequence
atgaaacacagaaatttaatg

SEQ ID NO: 304040 - DNA, 21 bp, Artificial sequence
  SiRNA target sequence
tgaaacacagaaatttaatga

SEQ ID NO: 304041 - DNA, 21 bp, Artificial sequence
  SiRNA target sequence
gaaacacagaaatttaatgaa

SEQ ID NO: 304042 - DNA, 21 bp, Artificial sequence
  SiRNA target sequence
aaacacagaaatttaatgaaa

SEQ ID NO: 304043 - DNA, 21 bp, Artificial sequence
  SiRNA target sequence
aacacagaaatttaatgaaat

SEQ ID NO: 304044 - DNA, 21 bp, Artificial sequence
  SiRNA target sequence
acacagaaatttaatgaaatg

SEQ ID NO: 304045 - DNA, 21 bp, Artificial sequence
  SiRNA target sequence
cacagaaatttaatgaaatgt

SEQ ID NO: 304046 - DNA, 21 bp, Artificial sequence
  SiRNA target sequence
acagaaatttaatgaaatgtg

SEQ ID NO: 304047 - DNA, 21 bp, Artificial sequence
  SiRNA target sequence
cagaaatttaatgaaatgtgc

SEQ ID NO: 304048 - DNA, 21 bp, Artificial sequence
  SiRNA target sequence
agaaatttaatgaaatgtgct

SEQ ID NO: 304049 - DNA, 21 bp, Artificial sequence
  SiRNA target sequence
gaaatttaatgaaatgtgcta

SEQ ID NO: 304050 - DNA, 21 bp, Artificial sequence
  SiRNA target sequence
aaatttaatgaaatgtgctat

SEQ ID NO: 304051 - DNA, 21 bp, Artificial sequence
  SiRNA target sequence
aatttaatgaaatgtgctatg

SEQ ID NO: 304052 - DNA, 21 bp, Artificial sequence
  SiRNA target sequence
atttaatgaaatgtgctatgg

SEQ ID NO: 304053 - DNA, 21 bp, Artificial sequence
  SiRNA target sequence
tttaatgaaatgtgctatgga

SEQ ID NO: 304054 - DNA, 21 bp, Artificial sequence
  SiRNA target sequence
ttaatgaaatgtgctatggat

SEQ ID NO: 304055 - DNA, 21 bp, Artificial sequence
  SiRNA target sequence
taatgaaatgtgctatggata

SEQ ID NO: 304056 - DNA, 21 bp, Artificial sequence
  SiRNA target sequence
aatgaaatgtgctatggatac

SEQ ID NO: 304057 - DNA, 21 bp, Artificial sequence
  SiRNA target sequence
atgaaatgtgctatggataca

SEQ ID NO: 304058 - DNA, 21 bp, Artificial sequence
  SiRNA target sequence
tgaaatgtgctatggatacac

SEQ ID NO: 304059 - DNA, 21 bp, Artificial sequence
  SiRNA target sequence
gaaatgtgctatggatacacc

SEQ ID NO: 304060 - DNA, 21 bp, Artificial sequence
  SiRNA target sequence
aaatgtgctatggatacacct

SEQ ID NO: 304061 - DNA, 21 bp, Artificial sequence
  SiRNA target sequence
aatgtgctatggatacacctt

SEQ ID NO: 304062 - DNA, 21 bp, Artificial sequence
  SiRNA target sequence
atgtgctatggatacacctta

SEQ ID NO: 304063 - DNA, 21 bp, Artificial sequence
  SiRNA target sequence
tgtgctatggatacaccttat

SEQ ID NO: 304064 - DNA, 21 bp, Artificial sequence
  SiRNA target sequence
gtgctatggatacaccttata

SEQ ID NO: 304065 - DNA, 21 bp, Artificial sequence
  SiRNA target sequence
tgctatggatacaccttatat

SEQ ID NO: 304066 - DNA, 21 bp, Artificial sequence
  SiRNA target sequence
gctatggatacaccttatatc

SEQ ID NO: 304067 - DNA, 21 bp, Artificial sequence
  SiRNA target sequence
ctatggatacaccttatatcg

SEQ ID NO: 304068 - DNA, 21 bp, Artificial sequence
  SiRNA target sequence
tatggatacaccttatatcga

SEQ ID NO: 304069 - DNA, 21 bp, Artificial sequence
  SiRNA target sequence
atggatacaccttatatcgac

SEQ ID NO: 304070 - DNA, 21 bp, Artificial sequence
  SiRNA target sequence
tggatacaccttatatcgaca

SEQ ID NO: 304071 - DNA, 21 bp, Artificial sequence
  SiRNA target sequence
ggatacaccttatatcgacaa

SEQ ID NO: 304072 - DNA, 21 bp, Artificial sequence
  SiRNA target sequence
gatacaccttatatcgacaag

SEQ ID NO: 304073 - DNA, 21 bp, Artificial sequence
  SiRNA target sequence
atacaccttatatcgacaagg

SEQ ID NO: 304074 - DNA, 21 bp, Artificial sequence
  SiRNA target sequence
tacaccttatatcgacaagga

SEQ ID NO: 304075 - DNA, 21 bp, Artificial sequence
  SiRNA target sequence
acaccttatatcgacaaggac

SEQ ID NO: 304076 - DNA, 21 bp, Artificial sequence
  SiRNA target sequence
caccttatatcgacaaggaca

SEQ ID NO: 304077 - DNA, 21 bp, Artificial sequence
  SiRNA target sequence
accttatatcgacaaggacat

SEQ ID NO: 304078 - DNA, 21 bp, Artificial sequence
  SiRNA target sequence
ccttatatcgacaaggacatg

SEQ ID NO: 304079 - DNA, 21 bp, Artificial sequence
  SiRNA target sequence
cttatatcgacaaggacatga

SEQ ID NO: 304080 - DNA, 21 bp, Artificial sequence
  SiRNA target sequence
ttatatcgacaaggacatgat

SEQ ID NO: 304081 - DNA, 21 bp, Artificial sequence
  SiRNA target sequence
tatatcgacaaggacatgatc

SEQ ID NO: 304082 - DNA, 21 bp, Artificial sequence
  SiRNA target sequence
atatcgacaaggacatgatcg

SEQ ID NO: 304083 - DNA, 21 bp, Artificial sequence
  SiRNA target sequence
tatcgacaaggacatgatcga

SEQ ID NO: 304084 - DNA, 21 bp, Artificial sequence
  SiRNA target sequence
atcgacaaggacatgatcgag

SEQ ID NO: 304085 - DNA, 21 bp, Artificial sequence
  SiRNA target sequence
tcgacaaggacatgatcgagg

SEQ ID NO: 304086 - DNA, 21 bp, Artificial sequence
  SiRNA target sequence
cgacaaggacatgatcgagga

SEQ ID NO: 304087 - DNA, 21 bp, Artificial sequence
  SiRNA target sequence
gacaaggacatgatcgaggaa

SEQ ID NO: 304088 - DNA, 21 bp, Artificial sequence
  SiRNA target sequence
acaaggacatgatcgaggaag

SEQ ID NO: 304089 - DNA, 21 bp, Artificial sequence
  SiRNA target sequence
caaggacatgatcgaggaagc

SEQ ID NO: 304090 - DNA, 21 bp, Artificial sequence
  SiRNA target sequence
aaggacatgatcgaggaagca

SEQ ID NO: 304091 - DNA, 21 bp, Artificial sequence
  SiRNA target sequence
aggacatgatcgaggaagcat

SEQ ID NO: 304092 - DNA, 21 bp, Artificial sequence
  SiRNA target sequence
ggacatgatcgaggaagcata

SEQ ID NO: 304093 - DNA, 21 bp, Artificial sequence
  SiRNA target sequence
gacatgatcgaggaagcatat

SEQ ID NO: 304094 - DNA, 21 bp, Artificial sequence
  SiRNA target sequence
acatgatcgaggaagcatatc

SEQ ID NO: 304095 - DNA, 21 bp, Artificial sequence
  SiRNA target sequence
catgatcgaggaagcatatca

SEQ ID NO: 304096 - DNA, 21 bp, Artificial sequence
  SiRNA target sequence
atgatcgaggaagcatatcag

SEQ ID NO: 304097 - DNA, 21 bp, Artificial sequence
  SiRNA target sequence
tgatcgaggaagcatatcagt

SEQ ID NO: 304098 - DNA, 21 bp, Artificial sequence
  SiRNA target sequence
gatcgaggaagcatatcagtt

SEQ ID NO: 304099 - DNA, 21 bp, Artificial sequence
  SiRNA target sequence
atcgaggaagcatatcagtta

SEQ ID NO: 304100 - DNA, 21 bp, Artificial sequence
  SiRNA target sequence
tcgaggaagcatatcagttaa

SEQ ID NO: 304101 - DNA, 21 bp, Artificial sequence
  SiRNA target sequence
cgaggaagcatatcagttaac

SEQ ID NO: 304102 - DNA, 21 bp, Artificial sequence
  SiRNA target sequence
gaggaagcatatcagttaact

SEQ ID NO: 304103 - DNA, 21 bp, Artificial sequence
  SiRNA target sequence
aggaagcatatcagttaacta

SEQ ID NO: 304104 - DNA, 21 bp, Artificial sequence
  SiRNA target sequence
ggaagcatatcagttaactaa

SEQ ID NO: 304105 - DNA, 21 bp, Artificial sequence
  SiRNA target sequence
gaagcatatcagttaactaaa

SEQ ID NO: 304106 - DNA, 21 bp, Artificial sequence
  SiRNA target sequence
aagcatatcagttaactaaat

SEQ ID NO: 304107 - DNA, 21 bp, Artificial sequence
  SiRNA target sequence
agcatatcagttaactaaatc

SEQ ID NO: 304108 - DNA, 21 bp, Artificial sequence
  SiRNA target sequence
gcatatcagttaactaaatcc

SEQ ID NO: 304109 - DNA, 21 bp, Artificial sequence
  SiRNA target sequence
catatcagttaactaaatccg

SEQ ID NO: 304110 - DNA, 21 bp, Artificial sequence
  SiRNA target sequence
atatcagttaactaaatccgt

SEQ ID NO: 304111 - DNA, 21 bp, Artificial sequence
  SiRNA target sequence
tatcagttaactaaatccgtt

SEQ ID NO: 304112 - DNA, 21 bp, Artificial sequence
  SiRNA target sequence
atcagttaactaaatccgttt

SEQ ID NO: 304113 - DNA, 21 bp, Artificial sequence
  SiRNA target sequence
tcagttaactaaatccgtttg

SEQ ID NO: 304114 - DNA, 21 bp, Artificial sequence
  SiRNA target sequence
cagttaactaaatccgtttgg

SEQ ID NO: 304115 - DNA, 21 bp, Artificial sequence
  SiRNA target sequence
agttaactaaatccgtttggt

SEQ ID NO: 304116 - DNA, 21 bp, Artificial sequence
  SiRNA target sequence
gttaactaaatccgtttggtt

SEQ ID NO: 304117 - DNA, 21 bp, Artificial sequence
  SiRNA target sequence
ttaactaaatccgtttggtta

SEQ ID NO: 304118 - DNA, 21 bp, Artificial sequence
  SiRNA target sequence
taactaaatccgtttggttaa

SEQ ID NO: 304119 - DNA, 21 bp, Artificial sequence
  SiRNA target sequence
aactaaatccgtttggttaaa

SEQ ID NO: 304120 - DNA, 21 bp, Artificial sequence
  SiRNA target sequence
actaaatccgtttggttaaaa

SEQ ID NO: 304121 - DNA, 21 bp, Artificial sequence
  SiRNA target sequence
ctaaatccgtttggttaaaag

SEQ ID NO: 304122 - DNA, 21 bp, Artificial sequence
  SiRNA target sequence
taaatccgtttggttaaaagg

SEQ ID NO: 304123 - DNA, 21 bp, Artificial sequence
  SiRNA target sequence
aaatccgtttggttaaaaggt

SEQ ID NO: 304124 - DNA, 21 bp, Artificial sequence
  SiRNA target sequence
aatccgtttggttaaaaggta

SEQ ID NO: 304125 - DNA, 21 bp, Artificial sequence
  SiRNA target sequence
atccgtttggttaaaaggtat

SEQ ID NO: 304126 - DNA, 21 bp, Artificial sequence
  SiRNA target sequence
tccgtttggttaaaaggtatg

SEQ ID NO: 304127 - DNA, 21 bp, Artificial sequence
  SiRNA target sequence
ccgtttggttaaaaggtatgc

SEQ ID NO: 304128 - DNA, 21 bp, Artificial sequence
  SiRNA target sequence
cgtttggttaaaaggtatgcg

SEQ ID NO: 304129 - DNA, 21 bp, Artificial sequence
  SiRNA target sequence
gtttggttaaaaggtatgcga

SEQ ID NO: 304130 - DNA, 21 bp, Artificial sequence
  SiRNA target sequence
tttggttaaaaggtatgcgag

SEQ ID NO: 304131 - DNA, 21 bp, Artificial sequence
  SiRNA target sequence
ttggttaaaaggtatgcgaga

SEQ ID NO: 304132 - DNA, 21 bp, Artificial sequence
  SiRNA target sequence
tggttaaaaggtatgcgagat

SEQ ID NO: 304133 - DNA, 21 bp, Artificial sequence
  SiRNA target sequence
ggttaaaaggtatgcgagatg

SEQ ID NO: 304134 - DNA, 21 bp, Artificial sequence
  SiRNA target sequence
gttaaaaggtatgcgagatga

SEQ ID NO: 304135 - DNA, 21 bp, Artificial sequence
  SiRNA target sequence
ttaaaaggtatgcgagatgaa

SEQ ID NO: 304136 - DNA, 21 bp, Artificial sequence
  SiRNA target sequence
taaaaggtatgcgagatgaat

SEQ ID NO: 304137 - DNA, 21 bp, Artificial sequence
  SiRNA target sequence
aaaaggtatgcgagatgaatt

SEQ ID NO: 304138 - DNA, 21 bp, Artificial sequence
  SiRNA target sequence
aaaggtatgcgagatgaattg

SEQ ID NO: 304139 - DNA, 21 bp, Artificial sequence
  SiRNA target sequence
aaggtatgcgagatgaattga

SEQ ID NO: 304140 - DNA, 21 bp, Artificial sequence
  SiRNA target sequence
aggtatgcgagatgaattgaa

SEQ ID NO: 304141 - DNA, 21 bp, Artificial sequence
  SiRNA target sequence
ggtatgcgagatgaattgaaa

SEQ ID NO: 304142 - DNA, 21 bp, Artificial sequence
  SiRNA target sequence
gtatgcgagatgaattgaaaa

SEQ ID NO: 304143 - DNA, 21 bp, Artificial sequence
  SiRNA target sequence
tatgcgagatgaattgaaaaa

SEQ ID NO: 304144 - DNA, 21 bp, Artificial sequence
  SiRNA target sequence
atgcgagatgaattgaaaaag

SEQ ID NO: 304145 - DNA, 21 bp, Artificial sequence
  SiRNA target sequence
tgcgagatgaattgaaaaagg

SEQ ID NO: 304146 - DNA, 21 bp, Artificial sequence
  SiRNA target sequence
gcgagatgaattgaaaaaggt

SEQ ID NO: 304147 - DNA, 21 bp, Artificial sequence
  SiRNA target sequence
cgagatgaattgaaaaaggtt

SEQ ID NO: 304148 - DNA, 21 bp, Artificial sequence
  SiRNA target sequence
gagatgaattgaaaaaggttc

SEQ ID NO: 304149 - DNA, 21 bp, Artificial sequence
  SiRNA target sequence
agatgaattgaaaaaggttct

SEQ ID NO: 304150 - DNA, 21 bp, Artificial sequence
  SiRNA target sequence
gatgaattgaaaaaggttctc

SEQ ID NO: 304151 - DNA, 21 bp, Artificial sequence
  SiRNA target sequence
atgaattgaaaaaggttctca

SEQ ID NO: 304152 - DNA, 21 bp, Artificial sequence
  SiRNA target sequence
tgaattgaaaaaggttctcac

SEQ ID NO: 304153 - DNA, 21 bp, Artificial sequence
  SiRNA target sequence
gaattgaaaaaggttctcact

SEQ ID NO: 304154 - DNA, 21 bp, Artificial sequence
  SiRNA target sequence
aattgaaaaaggttctcactt

SEQ ID NO: 304155 - DNA, 21 bp, Artificial sequence
  SiRNA target sequence
attgaaaaaggttctcactta

SEQ ID NO: 304156 - DNA, 21 bp, Artificial sequence
  SiRNA target sequence
ttgaaaaaggttctcacttat

SEQ ID NO: 304157 - DNA, 21 bp, Artificial sequence
  SiRNA target sequence
tgaaaaaggttctcacttatg

SEQ ID NO: 304158 - DNA, 21 bp, Artificial sequence
  SiRNA target sequence
gaaaaaggttctcacttatga

SEQ ID NO: 304159 - DNA, 21 bp, Artificial sequence
  SiRNA target sequence
aaaaaggttctcacttatgaa

SEQ ID NO: 304160 - DNA, 21 bp, Artificial sequence
  SiRNA target sequence
aaaaggttctcacttatgaag

SEQ ID NO: 304161 - DNA, 21 bp, Artificial sequence
  SiRNA target sequence
aaaggttctcacttatgaaga

SEQ ID NO: 304162 - DNA, 21 bp, Artificial sequence
  SiRNA target sequence
aaggttctcacttatgaagaa

SEQ ID NO: 304163 - DNA, 21 bp, Artificial sequence
  SiRNA target sequence
aggttctcacttatgaagaag

SEQ ID NO: 304164 - DNA, 21 bp, Artificial sequence
  SiRNA target sequence
ggttctcacttatgaagaagc

SEQ ID NO: 304165 - DNA, 21 bp, Artificial sequence
  SiRNA target sequence
gttctcacttatgaagaagcc

SEQ ID NO: 304166 - DNA, 21 bp, Artificial sequence
  SiRNA target sequence
ttctcacttatgaagaagcca

SEQ ID NO: 304167 - DNA, 21 bp, Artificial sequence
  SiRNA target sequence
tctcacttatgaagaagccat

SEQ ID NO: 304168 - DNA, 21 bp, Artificial sequence
  SiRNA target sequence
ctcacttatgaagaagccatt

SEQ ID NO: 304169 - DNA, 21 bp, Artificial sequence
  SiRNA target sequence
tcacttatgaagaagccattt

SEQ ID NO: 304170 - DNA, 21 bp, Artificial sequence
  SiRNA target sequence
cacttatgaagaagccatttg

SEQ ID NO: 304171 - DNA, 21 bp, Artificial sequence
  SiRNA target sequence
acttatgaagaagccatttgt

SEQ ID NO: 304172 - DNA, 21 bp, Artificial sequence
  SiRNA target sequence
cttatgaagaagccatttgtg

SEQ ID NO: 304173 - DNA, 21 bp, Artificial sequence
  SiRNA target sequence
ttatgaagaagccatttgtgg

SEQ ID NO: 304174 - DNA, 21 bp, Artificial sequence
  SiRNA target sequence
tatgaagaagccatttgtggc

SEQ ID NO: 304175 - DNA, 21 bp, Artificial sequence
  SiRNA target sequence
atgaagaagccatttgtggct

SEQ ID NO: 304176 - DNA, 21 bp, Artificial sequence
  SiRNA target sequence
tgaagaagccatttgtggctc

SEQ ID NO: 304177 - DNA, 21 bp, Artificial sequence
  SiRNA target sequence
gaagaagccatttgtggctct

SEQ ID NO: 304178 - DNA, 21 bp, Artificial sequence
  SiRNA target sequence
aagaagccatttgtggctctg

SEQ ID NO: 304179 - DNA, 21 bp, Artificial sequence
  SiRNA target sequence
agaagccatttgtggctctga

SEQ ID NO: 304180 - DNA, 21 bp, Artificial sequence
  SiRNA target sequence
gaagccatttgtggctctgaa

SEQ ID NO: 304181 - DNA, 21 bp, Artificial sequence
  SiRNA target sequence
aagccatttgtggctctgaag

SEQ ID NO: 304182 - DNA, 21 bp, Artificial sequence
  SiRNA target sequence
agccatttgtggctctgaagt

SEQ ID NO: 304183 - DNA, 21 bp, Artificial sequence
  SiRNA target sequence
gccatttgtggctctgaagta

SEQ ID NO: 304184 - DNA, 21 bp, Artificial sequence
  SiRNA target sequence
ccatttgtggctctgaagtaa

SEQ ID NO: 304185 - DNA, 21 bp, Artificial sequence
  SiRNA target sequence
catttgtggctctgaagtaag

SEQ ID NO: 304186 - DNA, 21 bp, Artificial sequence
  SiRNA target sequence
atttgtggctctgaagtaagt

SEQ ID NO: 304187 - DNA, 21 bp, Artificial sequence
  SiRNA target sequence
tttgtggctctgaagtaagtg

SEQ ID NO: 304188 - DNA, 21 bp, Artificial sequence
  SiRNA target sequence
ttgtggctctgaagtaagtga

SEQ ID NO: 304189 - DNA, 21 bp, Artificial sequence
  SiRNA target sequence
tgtggctctgaagtaagtgaa

SEQ ID NO: 304190 - DNA, 21 bp, Artificial sequence
  SiRNA target sequence
gtggctctgaagtaagtgaat

SEQ ID NO: 304191 - DNA, 21 bp, Artificial sequence
  SiRNA target sequence
tggctctgaagtaagtgaata

SEQ ID NO: 304192 - DNA, 21 bp, Artificial sequence
  SiRNA target sequence
ggctctgaagtaagtgaatac

SEQ ID NO: 304193 - DNA, 21 bp, Artificial sequence
  SiRNA target sequence
gctctgaagtaagtgaataca

SEQ ID NO: 304194 - DNA, 21 bp, Artificial sequence
  SiRNA target sequence
ctctgaagtaagtgaatacat

SEQ ID NO: 304195 - DNA, 21 bp, Artificial sequence
  SiRNA target sequence
tctgaagtaagtgaatacatt

SEQ ID NO: 304196 - DNA, 21 bp, Artificial sequence
  SiRNA target sequence
ctgaagtaagtgaatacattt

SEQ ID NO: 304197 - DNA, 21 bp, Artificial sequence
  SiRNA target sequence
tgaagtaagtgaatacatttc

SEQ ID NO: 304198 - DNA, 21 bp, Artificial sequence
  SiRNA target sequence
gaagtaagtgaatacatttct

SEQ ID NO: 304199 - DNA, 21 bp, Artificial sequence
  SiRNA target sequence
aagtaagtgaatacatttctt

SEQ ID NO: 304200 - DNA, 21 bp, Artificial sequence
  SiRNA target sequence
agtaagtgaatacatttcttc

SEQ ID NO: 304201 - DNA, 21 bp, Artificial sequence
  SiRNA target sequence
gtaagtgaatacatttcttca

SEQ ID NO: 304202 - DNA, 21 bp, Artificial sequence
  SiRNA target sequence
taagtgaatacatttcttcaa

SEQ ID NO: 304203 - DNA, 21 bp, Artificial sequence
  SiRNA target sequence
aagtgaatacatttcttcaat

SEQ ID NO: 304204 - DNA, 21 bp, Artificial sequence
  SiRNA target sequence
agtgaatacatttcttcaatt

SEQ ID NO: 304205 - DNA, 21 bp, Artificial sequence
  SiRNA target sequence
gtgaatacatttcttcaatta

SEQ ID NO: 304206 - DNA, 21 bp, Artificial sequence
  SiRNA target sequence
tgaatacatttcttcaattaa

SEQ ID NO: 304207 - DNA, 21 bp, Artificial sequence
  SiRNA target sequence
gaatacatttcttcaattaat

SEQ ID NO: 304208 - DNA, 21 bp, Artificial sequence
  SiRNA target sequence
aatacatttcttcaattaata

SEQ ID NO: 304209 - DNA, 21 bp, Artificial sequence
  SiRNA target sequence
atacatttcttcaattaatag

SEQ ID NO: 304210 - DNA, 21 bp, Artificial sequence
  SiRNA target sequence
tacatttcttcaattaatagg

SEQ ID NO: 304211 - DNA, 21 bp, Artificial sequence
  SiRNA target sequence
acatttcttcaattaatagga

SEQ ID NO: 304212 - DNA, 21 bp, Artificial sequence
  SiRNA target sequence
catttcttcaattaataggag

SEQ ID NO: 304213 - DNA, 21 bp, Artificial sequence
  SiRNA target sequence
atttcttcaattaataggagt

SEQ ID NO: 304214 - DNA, 21 bp, Artificial sequence
  SiRNA target sequence
tttcttcaattaataggagta

SEQ ID NO: 304215 - DNA, 21 bp, Artificial sequence
  SiRNA target sequence
ttcttcaattaataggagtag

SEQ ID NO: 304216 - DNA, 21 bp, Artificial sequence
  SiRNA target sequence
tcttcaattaataggagtagc

SEQ ID NO: 304217 - DNA, 21 bp, Artificial sequence
  SiRNA target sequence
cttcaattaataggagtagct

SEQ ID NO: 304218 - DNA, 21 bp, Artificial sequence
  SiRNA target sequence
ttcaattaataggagtagctc

SEQ ID NO: 304219 - DNA, 21 bp, Artificial sequence
  SiRNA target sequence
tcaattaataggagtagctcc

SEQ ID NO: 304220 - DNA, 21 bp, Artificial sequence
  SiRNA target sequence
caattaataggagtagctccc

SEQ ID NO: 304221 - DNA, 21 bp, Artificial sequence
  SiRNA target sequence
aattaataggagtagctcccc

SEQ ID NO: 304222 - DNA, 21 bp, Artificial sequence
  SiRNA target sequence
attaataggagtagctcccca

SEQ ID NO: 304223 - DNA, 21 bp, Artificial sequence
  SiRNA target sequence
ttaataggagtagctccccag

SEQ ID NO: 304224 - DNA, 21 bp, Artificial sequence
  SiRNA target sequence
taataggagtagctccccagg

SEQ ID NO: 304225 - DNA, 21 bp, Artificial sequence
  SiRNA target sequence
aataggagtagctccccagga

SEQ ID NO: 304226 - DNA, 21 bp, Artificial sequence
  SiRNA target sequence
ataggagtagctccccaggat

SEQ ID NO: 304227 - DNA, 21 bp, Artificial sequence
  SiRNA target sequence
taggagtagctccccaggata

SEQ ID NO: 304228 - DNA, 21 bp, Artificial sequence
  SiRNA target sequence
aggagtagctccccaggatat

SEQ ID NO: 304229 - DNA, 21 bp, Artificial sequence
  SiRNA target sequence
ggagtagctccccaggatatc

SEQ ID NO: 304230 - DNA, 21 bp, Artificial sequence
  SiRNA target sequence
gagtagctccccaggatatcc

SEQ ID NO: 304231 - DNA, 21 bp, Artificial sequence
  SiRNA target sequence
agtagctccccaggatatcct

SEQ ID NO: 304232 - DNA, 21 bp, Artificial sequence
  SiRNA target sequence
gtagctccccaggatatcctt

SEQ ID NO: 304233 - DNA, 21 bp, Artificial sequence
  SiRNA target sequence
tagctccccaggatatccttg

SEQ ID NO: 304234 - DNA, 21 bp, Artificial sequence
  SiRNA target sequence
agctccccaggatatccttgg

SEQ ID NO: 304235 - DNA, 21 bp, Artificial sequence
  SiRNA target sequence
gctccccaggatatccttgga

SEQ ID NO: 304236 - DNA, 21 bp, Artificial sequence
  SiRNA target sequence
ctccccaggatatccttggat

SEQ ID NO: 304237 - DNA, 21 bp, Artificial sequence
  SiRNA target sequence
tccccaggatatccttggata

SEQ ID NO: 304238 - DNA, 21 bp, Artificial sequence
  SiRNA target sequence
ccccaggatatccttggataa

SEQ ID NO: 304239 - DNA, 21 bp, Artificial sequence
  SiRNA target sequence
cccaggatatccttggataaa

SEQ ID NO: 304240 - DNA, 21 bp, Artificial sequence
  SiRNA target sequence
ccaggatatccttggataaag

SEQ ID NO: 304241 - DNA, 21 bp, Artificial sequence
  SiRNA target sequence
caggatatccttggataaagg

SEQ ID NO: 304242 - DNA, 21 bp, Artificial sequence
  SiRNA target sequence
aggatatccttggataaagga

SEQ ID NO: 304243 - DNA, 21 bp, Artificial sequence
  SiRNA target sequence
ggatatccttggataaaggat

SEQ ID NO: 304244 - DNA, 21 bp, Artificial sequence
  SiRNA target sequence
gatatccttggataaaggata

SEQ ID NO: 304245 - DNA, 21 bp, Artificial sequence
  SiRNA target sequence
atatccttggataaaggatag

SEQ ID NO: 304246 - DNA, 21 bp, Artificial sequence
  SiRNA target sequence
tatccttggataaaggataga

SEQ ID NO: 304247 - DNA, 21 bp, Artificial sequence
  SiRNA target sequence
atccttggataaaggatagag

SEQ ID NO: 304248 - DNA, 21 bp, Artificial sequence
  SiRNA target sequence
tccttggataaaggatagagt

SEQ ID NO: 304249 - DNA, 21 bp, Artificial sequence
  SiRNA target sequence
ccttggataaaggatagagtg

SEQ ID NO: 304250 - DNA, 21 bp, Artificial sequence
  SiRNA target sequence
cttggataaaggatagagtga

SEQ ID NO: 304251 - DNA, 21 bp, Artificial sequence
  SiRNA target sequence
ttggataaaggatagagtgaa

SEQ ID NO: 304252 - DNA, 21 bp, Artificial sequence
  SiRNA target sequence
tggataaaggatagagtgaaa

SEQ ID NO: 304253 - DNA, 21 bp, Artificial sequence
  SiRNA target sequence
ggataaaggatagagtgaaag

SEQ ID NO: 304254 - DNA, 21 bp, Artificial sequence
  SiRNA target sequence
gataaaggatagagtgaaagg

SEQ ID NO: 304255 - DNA, 21 bp, Artificial sequence
  SiRNA target sequence
ataaaggatagagtgaaagga

SEQ ID NO: 304256 - DNA, 21 bp, Artificial sequence
  SiRNA target sequence
taaaggatagagtgaaaggaa

SEQ ID NO: 304257 - DNA, 21 bp, Artificial sequence
  SiRNA target sequence
aaaggatagagtgaaaggaac

SEQ ID NO: 304258 - DNA, 21 bp, Artificial sequence
  SiRNA target sequence
aaggatagagtgaaaggaact

SEQ ID NO: 304259 - DNA, 21 bp, Artificial sequence
  SiRNA target sequence
aggatagagtgaaaggaacta

SEQ ID NO: 304260 - DNA, 21 bp, Artificial sequence
  SiRNA target sequence
ggatagagtgaaaggaactaa

SEQ ID NO: 304261 - DNA, 21 bp, Artificial sequence
  SiRNA target sequence
gatagagtgaaaggaactaaa

SEQ ID NO: 304262 - DNA, 21 bp, Artificial sequence
  SiRNA target sequence
atagagtgaaaggaactaaag

SEQ ID NO: 304263 - DNA, 21 bp, Artificial sequence
  SiRNA target sequence
tagagtgaaaggaactaaagg

SEQ ID NO: 304264 - DNA, 21 bp, Artificial sequence
  SiRNA target sequence
agagtgaaaggaactaaagga

SEQ ID NO: 304265 - DNA, 21 bp, Artificial sequence
  SiRNA target sequence
gagtgaaaggaactaaaggaa

SEQ ID NO: 304266 - DNA, 21 bp, Artificial sequence
  SiRNA target sequence
agtgaaaggaactaaaggaaa

SEQ ID NO: 304267 - DNA, 21 bp, Artificial sequence
  SiRNA target sequence
gtgaaaggaactaaaggaaaa

SEQ ID NO: 304268 - DNA, 21 bp, Artificial sequence
  SiRNA target sequence
tgaaaggaactaaaggaaaac

SEQ ID NO: 304269 - DNA, 21 bp, Artificial sequence
  SiRNA target sequence
gaaaggaactaaaggaaaaca

SEQ ID NO: 304270 - DNA, 21 bp, Artificial sequence
  SiRNA target sequence
aaaggaactaaaggaaaacaa

SEQ ID NO: 304271 - DNA, 21 bp, Artificial sequence
  SiRNA target sequence
aaggaactaaaggaaaacaag

SEQ ID NO: 304272 - DNA, 21 bp, Artificial sequence
  SiRNA target sequence
aggaactaaaggaaaacaagg

SEQ ID NO: 304273 - DNA, 21 bp, Artificial sequence
  SiRNA target sequence
ggaactaaaggaaaacaaggc

SEQ ID NO: 304274 - DNA, 21 bp, Artificial sequence
  SiRNA target sequence
gaactaaaggaaaacaaggct

SEQ ID NO: 304275 - DNA, 21 bp, Artificial sequence
  SiRNA target sequence
aactaaaggaaaacaaggctg

SEQ ID NO: 304276 - DNA, 21 bp, Artificial sequence
  SiRNA target sequence
actaaaggaaaacaaggctgg

SEQ ID NO: 304277 - DNA, 21 bp, Artificial sequence
  SiRNA target sequence
ctaaaggaaaacaaggctggt

SEQ ID NO: 304278 - DNA, 21 bp, Artificial sequence
  SiRNA target sequence
taaaggaaaacaaggctggtt

SEQ ID NO: 304279 - DNA, 21 bp, Artificial sequence
  SiRNA target sequence
aaaggaaaacaaggctggttt

SEQ ID NO: 304280 - DNA, 21 bp, Artificial sequence
  SiRNA target sequence
aaggaaaacaaggctggtttg

SEQ ID NO: 304281 - DNA, 21 bp, Artificial sequence
  SiRNA target sequence
aggaaaacaaggctggtttgg

SEQ ID NO: 304282 - DNA, 21 bp, Artificial sequence
  SiRNA target sequence
ggaaaacaaggctggtttggt

SEQ ID NO: 304283 - DNA, 21 bp, Artificial sequence
  SiRNA target sequence
gaaaacaaggctggtttggta

SEQ ID NO: 304284 - DNA, 21 bp, Artificial sequence
  SiRNA target sequence
aaaacaaggctggtttggtac

SEQ ID NO: 304285 - DNA, 21 bp, Artificial sequence
  SiRNA target sequence
aaacaaggctggtttggtact

SEQ ID NO: 304286 - DNA, 21 bp, Artificial sequence
  SiRNA target sequence
aacaaggctggtttggtactg

SEQ ID NO: 304287 - DNA, 21 bp, Artificial sequence
  SiRNA target sequence
acaaggctggtttggtactga

SEQ ID NO: 304288 - DNA, 21 bp, Artificial sequence
  SiRNA target sequence
caaggctggtttggtactgat

SEQ ID NO: 304289 - DNA, 21 bp, Artificial sequence
  SiRNA target sequence
aaggctggtttggtactgatg

SEQ ID NO: 304290 - DNA, 21 bp, Artificial sequence
  SiRNA target sequence
aggctggtttggtactgatgg

SEQ ID NO: 304291 - DNA, 21 bp, Artificial sequence
  SiRNA target sequence
ggctggtttggtactgatgga

SEQ ID NO: 304292 - DNA, 21 bp, Artificial sequence
  SiRNA target sequence
gctggtttggtactgatggag

SEQ ID NO: 304293 - DNA, 21 bp, Artificial sequence
  SiRNA target sequence
ctggtttggtactgatggaga

SEQ ID NO: 304294 - DNA, 21 bp, Artificial sequence
  SiRNA target sequence
tggtttggtactgatggagaa

SEQ ID NO: 304295 - DNA, 21 bp, Artificial sequence
  SiRNA target sequence
ggtttggtactgatggagaat

SEQ ID NO: 304296 - DNA, 21 bp, Artificial sequence
  SiRNA target sequence
gtttggtactgatggagaatt

SEQ ID NO: 304297 - DNA, 21 bp, Artificial sequence
  SiRNA target sequence
tttggtactgatggagaattt

SEQ ID NO: 304298 - DNA, 21 bp, Artificial sequence
  SiRNA target sequence
ttggtactgatggagaattta

SEQ ID NO: 304299 - DNA, 21 bp, Artificial sequence
  SiRNA target sequence
tggtactgatggagaatttat

SEQ ID NO: 304300 - DNA, 21 bp, Artificial sequence
  SiRNA target sequence
ggtactgatggagaatttatt

SEQ ID NO: 304301 - DNA, 21 bp, Artificial sequence
  SiRNA target sequence
gtactgatggagaatttattc

SEQ ID NO: 304302 - DNA, 21 bp, Artificial sequence
  SiRNA target sequence
tactgatggagaatttattct

SEQ ID NO: 304303 - DNA, 21 bp, Artificial sequence
  SiRNA target sequence
actgatggagaatttattctc

SEQ ID NO: 304304 - DNA, 21 bp, Artificial sequence
  SiRNA target sequence
ctgatggagaatttattctca

SEQ ID NO: 304305 - DNA, 21 bp, Artificial sequence
  SiRNA target sequence
tgatggagaatttattctcaa

SEQ ID NO: 304306 - DNA, 21 bp, Artificial sequence
  SiRNA target sequence
gatggagaatttattctcaac

SEQ ID NO: 304307 - DNA, 21 bp, Artificial sequence
  SiRNA target sequence
atggagaatttattctcaacg

SEQ ID NO: 304308 - DNA, 21 bp, Artificial sequence
  SiRNA target sequence
tggagaatttattctcaacga

SEQ ID NO: 304309 - DNA, 21 bp, Artificial sequence
  SiRNA target sequence
ggagaatttattctcaacgaa

SEQ ID NO: 304310 - DNA, 21 bp, Artificial sequence
  SiRNA target sequence
gagaatttattctcaacgaag

SEQ ID NO: 304311 - DNA, 21 bp, Artificial sequence
  SiRNA target sequence
agaatttattctcaacgaaga

SEQ ID NO: 304312 - DNA, 21 bp, Artificial sequence
  SiRNA target sequence
gaatttattctcaacgaagat

SEQ ID NO: 304313 - DNA, 21 bp, Artificial sequence
  SiRNA target sequence
aatttattctcaacgaagatg

SEQ ID NO: 304314 - DNA, 21 bp, Artificial sequence
  SiRNA target sequence
atttattctcaacgaagatgt

SEQ ID NO: 304315 - DNA, 21 bp, Artificial sequence
  SiRNA target sequence
tttattctcaacgaagatgtc

SEQ ID NO: 304316 - DNA, 21 bp, Artificial sequence
  SiRNA target sequence
ttattctcaacgaagatgtcg

SEQ ID NO: 304317 - DNA, 21 bp, Artificial sequence
  SiRNA target sequence
tattctcaacgaagatgtcga

SEQ ID NO: 304318 - DNA, 21 bp, Artificial sequence
  SiRNA target sequence
attctcaacgaagatgtcgaa

SEQ ID NO: 304319 - DNA, 21 bp, Artificial sequence
  SiRNA target sequence
ttctcaacgaagatgtcgaat

SEQ ID NO: 304320 - DNA, 21 bp, Artificial sequence
  SiRNA target sequence
tctcaacgaagatgtcgaatt

SEQ ID NO: 304321 - DNA, 21 bp, Artificial sequence
  SiRNA target sequence
ctcaacgaagatgtcgaatta

SEQ ID NO: 304322 - DNA, 21 bp, Artificial sequence
  SiRNA target sequence
tcaacgaagatgtcgaattag

SEQ ID NO: 304323 - DNA, 21 bp, Artificial sequence
  SiRNA target sequence
caacgaagatgtcgaattagc

SEQ ID NO: 304324 - DNA, 21 bp, Artificial sequence
  SiRNA target sequence
aacgaagatgtcgaattagcc

SEQ ID NO: 304325 - DNA, 21 bp, Artificial sequence
  SiRNA target sequence
acgaagatgtcgaattagccg

SEQ ID NO: 304326 - DNA, 21 bp, Artificial sequence
  SiRNA target sequence
cgaagatgtcgaattagccgt

SEQ ID NO: 304327 - DNA, 21 bp, Artificial sequence
  SiRNA target sequence
gaagatgtcgaattagccgta

SEQ ID NO: 304328 - DNA, 21 bp, Artificial sequence
  SiRNA target sequence
aagatgtcgaattagccgtac

SEQ ID NO: 304329 - DNA, 21 bp, Artificial sequence
  SiRNA target sequence
agatgtcgaattagccgtaca

SEQ ID NO: 304330 - DNA, 21 bp, Artificial sequence
  SiRNA target sequence
gatgtcgaattagccgtacaa

SEQ ID NO: 304331 - DNA, 21 bp, Artificial sequence
  SiRNA target sequence
atgtcgaattagccgtacaac

SEQ ID NO: 304332 - DNA, 21 bp, Artificial sequence
  SiRNA target sequence
tgtcgaattagccgtacaacg

SEQ ID NO: 304333 - DNA, 21 bp, Artificial sequence
  SiRNA target sequence
gtcgaattagccgtacaacga

SEQ ID NO: 304334 - DNA, 21 bp, Artificial sequence
  SiRNA target sequence
tcgaattagccgtacaacgac

SEQ ID NO: 304335 - DNA, 21 bp, Artificial sequence
  SiRNA target sequence
cgaattagccgtacaacgacg

SEQ ID NO: 304336 - DNA, 21 bp, Artificial sequence
  SiRNA target sequence
gaattagccgtacaacgacga

SEQ ID NO: 304337 - DNA, 21 bp, Artificial sequence
  SiRNA target sequence
aattagccgtacaacgacgac

SEQ ID NO: 304338 - DNA, 21 bp, Artificial sequence
  SiRNA target sequence
attagccgtacaacgacgact

SEQ ID NO: 304339 - DNA, 21 bp, Artificial sequence
  SiRNA target sequence
ttagccgtacaacgacgacta

SEQ ID NO: 304340 - DNA, 21 bp, Artificial sequence
  SiRNA target sequence
tagccgtacaacgacgactac

SEQ ID NO: 304341 - DNA, 21 bp, Artificial sequence
  SiRNA target sequence
agccgtacaacgacgactaca

SEQ ID NO: 304342 - DNA, 21 bp, Artificial sequence
  SiRNA target sequence
gccgtacaacgacgactacaa

SEQ ID NO: 304343 - DNA, 21 bp, Artificial sequence
  SiRNA target sequence
ccgtacaacgacgactacaag

SEQ ID NO: 304344 - DNA, 21 bp, Artificial sequence
  SiRNA target sequence
cgtacaacgacgactacaagc

SEQ ID NO: 304345 - DNA, 21 bp, Artificial sequence
  SiRNA target sequence
gtacaacgacgactacaagca

SEQ ID NO: 304346 - DNA, 21 bp, Artificial sequence
  SiRNA target sequence
tacaacgacgactacaagcag

SEQ ID NO: 304347 - DNA, 21 bp, Artificial sequence
  SiRNA target sequence
acaacgacgactacaagcagc

SEQ ID NO: 304348 - DNA, 21 bp, Artificial sequence
  SiRNA target sequence
caacgacgactacaagcagct

SEQ ID NO: 304349 - DNA, 21 bp, Artificial sequence
  SiRNA target sequence
aacgacgactacaagcagctc

SEQ ID NO: 304350 - DNA, 21 bp, Artificial sequence
  SiRNA target sequence
acgacgactacaagcagctcg

SEQ ID NO: 304351 - DNA, 21 bp, Artificial sequence
  SiRNA target sequence
cgacgactacaagcagctcgt

SEQ ID NO: 304352 - DNA, 21 bp, Artificial sequence
  SiRNA target sequence
gacgactacaagcagctcgtg

SEQ ID NO: 304353 - DNA, 21 bp, Artificial sequence
  SiRNA target sequence
acgactacaagcagctcgtga

SEQ ID NO: 304354 - DNA, 21 bp, Artificial sequence
  SiRNA target sequence
cgactacaagcagctcgtgaa

SEQ ID NO: 304355 - DNA, 21 bp, Artificial sequence
  SiRNA target sequence
gactacaagcagctcgtgaag

SEQ ID NO: 304356 - DNA, 21 bp, Artificial sequence
  SiRNA target sequence
actacaagcagctcgtgaagg

SEQ ID NO: 304357 - DNA, 21 bp, Artificial sequence
  SiRNA target sequence
ctacaagcagctcgtgaagga

SEQ ID NO: 304358 - DNA, 21 bp, Artificial sequence
  SiRNA target sequence
tacaagcagctcgtgaaggaa

SEQ ID NO: 304359 - DNA, 21 bp, Artificial sequence
  SiRNA target sequence
acaagcagctcgtgaaggaaa

SEQ ID NO: 304360 - DNA, 21 bp, Artificial sequence
  SiRNA target sequence
caagcagctcgtgaaggaaaa

SEQ ID NO: 304361 - DNA, 21 bp, Artificial sequence
  SiRNA target sequence
aagcagctcgtgaaggaaaac

SEQ ID NO: 304362 - DNA, 21 bp, Artificial sequence
  SiRNA target sequence
agcagctcgtgaaggaaaacg

SEQ ID NO: 304363 - DNA, 21 bp, Artificial sequence
  SiRNA target sequence
gcagctcgtgaaggaaaacga

SEQ ID NO: 304364 - DNA, 21 bp, Artificial sequence
  SiRNA target sequence
cagctcgtgaaggaaaacgat

SEQ ID NO: 304365 - DNA, 21 bp, Artificial sequence
  SiRNA target sequence
agctcgtgaaggaaaacgatt

SEQ ID NO: 304366 - DNA, 21 bp, Artificial sequence
  SiRNA target sequence
gctcgtgaaggaaaacgatta

SEQ ID NO: 304367 - DNA, 21 bp, Artificial sequence
  SiRNA target sequence
ctcgtgaaggaaaacgattac

SEQ ID NO: 304368 - DNA, 21 bp, Artificial sequence
  SiRNA target sequence
tcgtgaaggaaaacgattacc

SEQ ID NO: 304369 - DNA, 21 bp, Artificial sequence
  SiRNA target sequence
cgtgaaggaaaacgattacct

SEQ ID NO: 304370 - DNA, 21 bp, Artificial sequence
  SiRNA target sequence
gtgaaggaaaacgattacctg

SEQ ID NO: 304371 - DNA, 21 bp, Artificial sequence
  SiRNA target sequence
tgaaggaaaacgattacctgt

SEQ ID NO: 304372 - DNA, 21 bp, Artificial sequence
  SiRNA target sequence
gaaggaaaacgattacctgtg

SEQ ID NO: 304373 - DNA, 21 bp, Artificial sequence
  SiRNA target sequence
aaggaaaacgattacctgtga

SEQ ID NO: 304374 - DNA, 21 bp, Artificial sequence
  SiRNA target sequence
aggaaaacgattacctgtgat

SEQ ID NO: 304375 - DNA, 21 bp, Artificial sequence
  SiRNA target sequence
ggaaaacgattacctgtgatg

SEQ ID NO: 304376 - DNA, 21 bp, Artificial sequence
  SiRNA target sequence
gaaaacgattacctgtgatgt

SEQ ID NO: 304377 - DNA, 21 bp, Artificial sequence
  SiRNA target sequence
aaaacgattacctgtgatgtg

SEQ ID NO: 304378 - DNA, 21 bp, Artificial sequence
  SiRNA target sequence
aaacgattacctgtgatgtgg

SEQ ID NO: 304379 - DNA, 21 bp, Artificial sequence
  SiRNA target sequence
aacgattacctgtgatgtggg

SEQ ID NO: 304380 - DNA, 21 bp, Artificial sequence
  SiRNA target sequence
acgattacctgtgatgtgggt

SEQ ID NO: 304381 - DNA, 21 bp, Artificial sequence
  SiRNA target sequence
cgattacctgtgatgtgggtc

SEQ ID NO: 304382 - DNA, 21 bp, Artificial sequence
  SiRNA target sequence
gattacctgtgatgtgggtcg

SEQ ID NO: 304383 - DNA, 21 bp, Artificial sequence
  SiRNA target sequence
attacctgtgatgtgggtcga

SEQ ID NO: 304384 - DNA, 21 bp, Artificial sequence
  SiRNA target sequence
ttacctgtgatgtgggtcgac

SEQ ID NO: 304385 - DNA, 21 bp, Artificial sequence
  SiRNA target sequence
tacctgtgatgtgggtcgaca

SEQ ID NO: 304386 - DNA, 21 bp, Artificial sequence
  SiRNA target sequence
acctgtgatgtgggtcgacac

SEQ ID NO: 304387 - DNA, 21 bp, Artificial sequence
  SiRNA target sequence
cctgtgatgtgggtcgacaca

SEQ ID NO: 304388 - DNA, 21 bp, Artificial sequence
  SiRNA target sequence
ctgtgatgtgggtcgacacat

SEQ ID NO: 304389 - DNA, 21 bp, Artificial sequence
  SiRNA target sequence
tgtgatgtgggtcgacacatt

SEQ ID NO: 304390 - DNA, 21 bp, Artificial sequence
  SiRNA target sequence
gtgatgtgggtcgacacattg

SEQ ID NO: 304391 - DNA, 21 bp, Artificial sequence
  SiRNA target sequence
tgatgtgggtcgacacattga

SEQ ID NO: 304392 - DNA, 21 bp, Artificial sequence
  SiRNA target sequence
gatgtgggtcgacacattgaa

SEQ ID NO: 304393 - DNA, 21 bp, Artificial sequence
  SiRNA target sequence
atgtgggtcgacacattgaaa

SEQ ID NO: 304394 - DNA, 21 bp, Artificial sequence
  SiRNA target sequence
tgtgggtcgacacattgaaag

SEQ ID NO: 304395 - DNA, 21 bp, Artificial sequence
  SiRNA target sequence
gtgggtcgacacattgaaaga

SEQ ID NO: 304396 - DNA, 21 bp, Artificial sequence
  SiRNA target sequence
tgggtcgacacattgaaagat

SEQ ID NO: 304397 - DNA, 21 bp, Artificial sequence
  SiRNA target sequence
gggtcgacacattgaaagatg

SEQ ID NO: 304398 - DNA, 21 bp, Artificial sequence
  SiRNA target sequence
ggtcgacacattgaaagatga

SEQ ID NO: 304399 - DNA, 21 bp, Artificial sequence
  SiRNA target sequence
gtcgacacattgaaagatgaa

SEQ ID NO: 304400 - DNA, 21 bp, Artificial sequence
  SiRNA target sequence
tcgacacattgaaagatgaac

SEQ ID NO: 304401 - DNA, 21 bp, Artificial sequence
  SiRNA target sequence
cgacacattgaaagatgaacg

SEQ ID NO: 304402 - DNA, 21 bp, Artificial sequence
  SiRNA target sequence
gacacattgaaagatgaacgt

SEQ ID NO: 304403 - DNA, 21 bp, Artificial sequence
  SiRNA target sequence
acacattgaaagatgaacgtc

SEQ ID NO: 304404 - DNA, 21 bp, Artificial sequence
  SiRNA target sequence
cacattgaaagatgaacgtcg

SEQ ID NO: 304405 - DNA, 21 bp, Artificial sequence
  SiRNA target sequence
acattgaaagatgaacgtcga

SEQ ID NO: 304406 - DNA, 21 bp, Artificial sequence
  SiRNA target sequence
cattgaaagatgaacgtcgac

SEQ ID NO: 304407 - DNA, 21 bp, Artificial sequence
  SiRNA target sequence
attgaaagatgaacgtcgacc

SEQ ID NO: 304408 - DNA, 21 bp, Artificial sequence
  SiRNA target sequence
ttgaaagatgaacgtcgacct

SEQ ID NO: 304409 - DNA, 21 bp, Artificial sequence
  SiRNA target sequence
tgaaagatgaacgtcgaccta

SEQ ID NO: 304410 - DNA, 21 bp, Artificial sequence
  SiRNA target sequence
gaaagatgaacgtcgacctat

SEQ ID NO: 304411 - DNA, 21 bp, Artificial sequence
  SiRNA target sequence
aaagatgaacgtcgacctatt

SEQ ID NO: 304412 - DNA, 21 bp, Artificial sequence
  SiRNA target sequence
aagatgaacgtcgacctattg

SEQ ID NO: 304413 - DNA, 21 bp, Artificial sequence
  SiRNA target sequence
agatgaacgtcgacctattga

SEQ ID NO: 304414 - DNA, 21 bp, Artificial sequence
  SiRNA target sequence
gatgaacgtcgacctattgaa

SEQ ID NO: 304415 - DNA, 21 bp, Artificial sequence
  SiRNA target sequence
atgaacgtcgacctattgaaa

SEQ ID NO: 304416 - DNA, 21 bp, Artificial sequence
  SiRNA target sequence
tgaacgtcgacctattgaaaa

SEQ ID NO: 304417 - DNA, 21 bp, Artificial sequence
  SiRNA target sequence
gaacgtcgacctattgaaaaa

SEQ ID NO: 304418 - DNA, 21 bp, Artificial sequence
  SiRNA target sequence
aacgtcgacctattgaaaaag

SEQ ID NO: 304419 - DNA, 21 bp, Artificial sequence
  SiRNA target sequence
acgtcgacctattgaaaaagt

SEQ ID NO: 304420 - DNA, 21 bp, Artificial sequence
  SiRNA target sequence
cgtcgacctattgaaaaagtt

SEQ ID NO: 304421 - DNA, 21 bp, Artificial sequence
  SiRNA target sequence
gtcgacctattgaaaaagtta

SEQ ID NO: 304422 - DNA, 21 bp, Artificial sequence
  SiRNA target sequence
tcgacctattgaaaaagttaa

SEQ ID NO: 304423 - DNA, 21 bp, Artificial sequence
  SiRNA target sequence
cgacctattgaaaaagttaat

SEQ ID NO: 304424 - DNA, 21 bp, Artificial sequence
  SiRNA target sequence
gacctattgaaaaagttaatc

SEQ ID NO: 304425 - DNA, 21 bp, Artificial sequence
  SiRNA target sequence
acctattgaaaaagttaatca

SEQ ID NO: 304426 - DNA, 21 bp, Artificial sequence
  SiRNA target sequence
cctattgaaaaagttaatcaa

SEQ ID NO: 304427 - DNA, 21 bp, Artificial sequence
  SiRNA target sequence
ctattgaaaaagttaatcaat

SEQ ID NO: 304428 - DNA, 21 bp, Artificial sequence
  SiRNA target sequence
tattgaaaaagttaatcaatt

SEQ ID NO: 304429 - DNA, 21 bp, Artificial sequence
  SiRNA target sequence
attgaaaaagttaatcaattg

SEQ ID NO: 304430 - DNA, 21 bp, Artificial sequence
  SiRNA target sequence
ttgaaaaagttaatcaattga

SEQ ID NO: 304431 - DNA, 21 bp, Artificial sequence
  SiRNA target sequence
tgaaaaagttaatcaattgaa

SEQ ID NO: 304432 - DNA, 21 bp, Artificial sequence
  SiRNA target sequence
gaaaaagttaatcaattgaaa

SEQ ID NO: 304433 - DNA, 21 bp, Artificial sequence
  SiRNA target sequence
aaaaagttaatcaattgaaaa

SEQ ID NO: 304434 - DNA, 21 bp, Artificial sequence
  SiRNA target sequence
aaaagttaatcaattgaaaac

SEQ ID NO: 304435 - DNA, 21 bp, Artificial sequence
  SiRNA target sequence
aaagttaatcaattgaaaaca

SEQ ID NO: 304436 - DNA, 21 bp, Artificial sequence
  SiRNA target sequence
aagttaatcaattgaaaacac

SEQ ID NO: 304437 - DNA, 21 bp, Artificial sequence
  SiRNA target sequence
agttaatcaattgaaaacacg

SEQ ID NO: 304438 - DNA, 21 bp, Artificial sequence
  SiRNA target sequence
gttaatcaattgaaaacacga

SEQ ID NO: 304439 - DNA, 21 bp, Artificial sequence
  SiRNA target sequence
ttaatcaattgaaaacacgag

SEQ ID NO: 304440 - DNA, 21 bp, Artificial sequence
  SiRNA target sequence
taatcaattgaaaacacgagt

SEQ ID NO: 304441 - DNA, 21 bp, Artificial sequence
  SiRNA target sequence
aatcaattgaaaacacgagta

SEQ ID NO: 304442 - DNA, 21 bp, Artificial sequence
  SiRNA target sequence
atcaattgaaaacacgagtat

SEQ ID NO: 304443 - DNA, 21 bp, Artificial sequence
  SiRNA target sequence
tcaattgaaaacacgagtatt

SEQ ID NO: 304444 - DNA, 21 bp, Artificial sequence
  SiRNA target sequence
caattgaaaacacgagtattc

SEQ ID NO: 304445 - DNA, 21 bp, Artificial sequence
  SiRNA target sequence
aattgaaaacacgagtattct

SEQ ID NO: 304446 - DNA, 21 bp, Artificial sequence
  SiRNA target sequence
attgaaaacacgagtattctc

SEQ ID NO: 304447 - DNA, 21 bp, Artificial sequence
  SiRNA target sequence
ttgaaaacacgagtattctca

SEQ ID NO: 304448 - DNA, 21 bp, Artificial sequence
  SiRNA target sequence
tgaaaacacgagtattctcaa

SEQ ID NO: 304449 - DNA, 21 bp, Artificial sequence
  SiRNA target sequence
gaaaacacgagtattctcaaa

SEQ ID NO: 304450 - DNA, 21 bp, Artificial sequence
  SiRNA target sequence
aaaacacgagtattctcaaat

SEQ ID NO: 304451 - DNA, 21 bp, Artificial sequence
  SiRNA target sequence
aaacacgagtattctcaaatg

SEQ ID NO: 304452 - DNA, 21 bp, Artificial sequence
  SiRNA target sequence
aacacgagtattctcaaatgg

SEQ ID NO: 304453 - DNA, 21 bp, Artificial sequence
  SiRNA target sequence
acacgagtattctcaaatgga

SEQ ID NO: 304454 - DNA, 21 bp, Artificial sequence
  SiRNA target sequence
cacgagtattctcaaatggac

SEQ ID NO: 304455 - DNA, 21 bp, Artificial sequence
  SiRNA target sequence
acgagtattctcaaatggacc

SEQ ID NO: 304456 - DNA, 21 bp, Artificial sequence
  SiRNA target sequence
cgagtattctcaaatggacca

SEQ ID NO: 304457 - DNA, 21 bp, Artificial sequence
  SiRNA target sequence
gagtattctcaaatggaccaa

SEQ ID NO: 304458 - DNA, 21 bp, Artificial sequence
  SiRNA target sequence
agtattctcaaatggaccaat

SEQ ID NO: 304459 - DNA, 21 bp, Artificial sequence
  SiRNA target sequence
gtattctcaaatggaccaatg

SEQ ID NO: 304460 - DNA, 21 bp, Artificial sequence
  SiRNA target sequence
tattctcaaatggaccaatgg

SEQ ID NO: 304461 - DNA, 21 bp, Artificial sequence
  SiRNA target sequence
attctcaaatggaccaatgga

SEQ ID NO: 304462 - DNA, 21 bp, Artificial sequence
  SiRNA target sequence
ttctcaaatggaccaatggac

SEQ ID NO: 304463 - DNA, 21 bp, Artificial sequence
  SiRNA target sequence
tctcaaatggaccaatggact

SEQ ID NO: 304464 - DNA, 21 bp, Artificial sequence
  SiRNA target sequence
ctcaaatggaccaatggactt

SEQ ID NO: 304465 - DNA, 21 bp, Artificial sequence
  SiRNA target sequence
tcaaatggaccaatggacttc

SEQ ID NO: 304466 - DNA, 21 bp, Artificial sequence
  SiRNA target sequence
caaatggaccaatggacttct

SEQ ID NO: 304467 - DNA, 21 bp, Artificial sequence
  SiRNA target sequence
aaatggaccaatggacttctc

SEQ ID NO: 304468 - DNA, 21 bp, Artificial sequence
  SiRNA target sequence
aatggaccaatggacttctca

SEQ ID NO: 304469 - DNA, 21 bp, Artificial sequence
  SiRNA target sequence
atggaccaatggacttctcaa

SEQ ID NO: 304470 - DNA, 21 bp, Artificial sequence
  SiRNA target sequence
tggaccaatggacttctcaat

SEQ ID NO: 304471 - DNA, 21 bp, Artificial sequence
  SiRNA target sequence
ggaccaatggacttctcaatt

SEQ ID NO: 304472 - DNA, 21 bp, Artificial sequence
  SiRNA target sequence
gaccaatggacttctcaattg

SEQ ID NO: 304473 - DNA, 21 bp, Artificial sequence
  SiRNA target sequence
accaatggacttctcaattgc

SEQ ID NO: 304474 - DNA, 21 bp, Artificial sequence
  SiRNA target sequence
ccaatggacttctcaattgcg

SEQ ID NO: 304475 - DNA, 21 bp, Artificial sequence
  SiRNA target sequence
caatggacttctcaattgcgt

SEQ ID NO: 304476 - DNA, 21 bp, Artificial sequence
  SiRNA target sequence
aatggacttctcaattgcgtt

SEQ ID NO: 304477 - DNA, 21 bp, Artificial sequence
  SiRNA target sequence
atggacttctcaattgcgttt

SEQ ID NO: 304478 - DNA, 21 bp, Artificial sequence
  SiRNA target sequence
tggacttctcaattgcgtttc

SEQ ID NO: 304479 - DNA, 21 bp, Artificial sequence
  SiRNA target sequence
ggacttctcaattgcgtttcg

SEQ ID NO: 304480 - DNA, 21 bp, Artificial sequence
  SiRNA target sequence
gacttctcaattgcgtttcga

SEQ ID NO: 304481 - DNA, 21 bp, Artificial sequence
  SiRNA target sequence
acttctcaattgcgtttcgaa

SEQ ID NO: 304482 - DNA, 21 bp, Artificial sequence
  SiRNA target sequence
cttctcaattgcgtttcgaat

SEQ ID NO: 304483 - DNA, 21 bp, Artificial sequence
  SiRNA target sequence
ttctcaattgcgtttcgaatg

SEQ ID NO: 304484 - DNA, 21 bp, Artificial sequence
  SiRNA target sequence
tctcaattgcgtttcgaatgt

SEQ ID NO: 304485 - DNA, 21 bp, Artificial sequence
  SiRNA target sequence
ctcaattgcgtttcgaatgta

SEQ ID NO: 304486 - DNA, 21 bp, Artificial sequence
  SiRNA target sequence
tcaattgcgtttcgaatgtat

SEQ ID NO: 304487 - DNA, 21 bp, Artificial sequence
  SiRNA target sequence
caattgcgtttcgaatgtatt

SEQ ID NO: 304488 - DNA, 21 bp, Artificial sequence
  SiRNA target sequence
aattgcgtttcgaatgtatta

SEQ ID NO: 304489 - DNA, 21 bp, Artificial sequence
  SiRNA target sequence
attgcgtttcgaatgtattat

SEQ ID NO: 304490 - DNA, 21 bp, Artificial sequence
  SiRNA target sequence
ttgcgtttcgaatgtattatt

SEQ ID NO: 304491 - DNA, 21 bp, Artificial sequence
  SiRNA target sequence
tgcgtttcgaatgtattattt

SEQ ID NO: 304492 - DNA, 21 bp, Artificial sequence
  SiRNA target sequence
gcgtttcgaatgtattatttg

SEQ ID NO: 304493 - DNA, 21 bp, Artificial sequence
  SiRNA target sequence
cgtttcgaatgtattatttgg

SEQ ID NO: 304494 - DNA, 21 bp, Artificial sequence
  SiRNA target sequence
gtttcgaatgtattatttggg

SEQ ID NO: 304495 - DNA, 21 bp, Artificial sequence
  SiRNA target sequence
tttcgaatgtattatttgggc

SEQ ID NO: 304496 - DNA, 21 bp, Artificial sequence
  SiRNA target sequence
ttcgaatgtattatttgggct

SEQ ID NO: 304497 - DNA, 21 bp, Artificial sequence
  SiRNA target sequence
tcgaatgtattatttgggctt

SEQ ID NO: 304498 - DNA, 21 bp, Artificial sequence
  SiRNA target sequence
cgaatgtattatttgggcttt

SEQ ID NO: 304499 - DNA, 21 bp, Artificial sequence
  SiRNA target sequence
gaatgtattatttgggcttta

SEQ ID NO: 304500 - DNA, 21 bp, Artificial sequence
  SiRNA target sequence
aatgtattatttgggctttat

SEQ ID NO: 304501 - DNA, 21 bp, Artificial sequence
  SiRNA target sequence
atgtattatttgggctttata

SEQ ID NO: 304502 - DNA, 21 bp, Artificial sequence
  SiRNA target sequence
tgtattatttgggctttatag

SEQ ID NO: 304503 - DNA, 21 bp, Artificial sequence
  SiRNA target sequence
gtattatttgggctttatagc

SEQ ID NO: 304504 - DNA, 21 bp, Artificial sequence
  SiRNA target sequence
tattatttgggctttatagct

SEQ ID NO: 304505 - DNA, 21 bp, Artificial sequence
  SiRNA target sequence
attatttgggctttatagctc

SEQ ID NO: 304506 - DNA, 21 bp, Artificial sequence
  SiRNA target sequence
ttatttgggctttatagctca

SEQ ID NO: 304507 - DNA, 21 bp, Artificial sequence
  SiRNA target sequence
tatttgggctttatagctcat

SEQ ID NO: 304508 - DNA, 21 bp, Artificial sequence
  SiRNA target sequence
atttgggctttatagctcatt

SEQ ID NO: 304509 - DNA, 21 bp, Artificial sequence
  SiRNA target sequence
tttgggctttatagctcattt

SEQ ID NO: 304510 - DNA, 21 bp, Artificial sequence
  SiRNA target sequence
ttgggctttatagctcatttg

SEQ ID NO: 304511 - DNA, 21 bp, Artificial sequence
  SiRNA target sequence
tgggctttatagctcatttga

SEQ ID NO: 304512 - DNA, 21 bp, Artificial sequence
  SiRNA target sequence
gggctttatagctcatttgat

SEQ ID NO: 304513 - DNA, 21 bp, Artificial sequence
  SiRNA target sequence
ggctttatagctcatttgatg

SEQ ID NO: 304514 - DNA, 21 bp, Artificial sequence
  SiRNA target sequence
gctttatagctcatttgatgg

SEQ ID NO: 304515 - DNA, 21 bp, Artificial sequence
  SiRNA target sequence
ctttatagctcatttgatgga

SEQ ID NO: 304516 - DNA, 21 bp, Artificial sequence
  SiRNA target sequence
tttatagctcatttgatggaa

SEQ ID NO: 304517 - DNA, 21 bp, Artificial sequence
  SiRNA target sequence
ttatagctcatttgatggaaa

SEQ ID NO: 304518 - DNA, 21 bp, Artificial sequence
  SiRNA target sequence
tatagctcatttgatggaaaa

SEQ ID NO: 304519 - DNA, 21 bp, Artificial sequence
  SiRNA target sequence
atagctcatttgatggaaaat

SEQ ID NO: 304520 - DNA, 21 bp, Artificial sequence
  SiRNA target sequence
tagctcatttgatggaaaatc

SEQ ID NO: 304521 - DNA, 21 bp, Artificial sequence
  SiRNA target sequence
agctcatttgatggaaaatcg

SEQ ID NO: 304522 - DNA, 21 bp, Artificial sequence
  SiRNA target sequence
gctcatttgatggaaaatcga

SEQ ID NO: 304523 - DNA, 21 bp, Artificial sequence
  SiRNA target sequence
ctcatttgatggaaaatcgaa

SEQ ID NO: 304524 - DNA, 21 bp, Artificial sequence
  SiRNA target sequence
tcatttgatggaaaatcgaat

SEQ ID NO: 304525 - DNA, 21 bp, Artificial sequence
  SiRNA target sequence
catttgatggaaaatcgaatt

SEQ ID NO: 304526 - DNA, 21 bp, Artificial sequence
  SiRNA target sequence
atttgatggaaaatcgaatta

SEQ ID NO: 304527 - DNA, 21 bp, Artificial sequence
  SiRNA target sequence
tttgatggaaaatcgaattac

SEQ ID NO: 304528 - DNA, 21 bp, Artificial sequence
  SiRNA target sequence
ttgatggaaaatcgaattacg

SEQ ID NO: 304529 - DNA, 21 bp, Artificial sequence
  SiRNA target sequence
tgatggaaaatcgaattacga

SEQ ID NO: 304530 - DNA, 21 bp, Artificial sequence
  SiRNA target sequence
gatggaaaatcgaattacgaa

SEQ ID NO: 304531 - DNA, 21 bp, Artificial sequence
  SiRNA target sequence
atggaaaatcgaattacgaat

SEQ ID NO: 304532 - DNA, 21 bp, Artificial sequence
  SiRNA target sequence
tggaaaatcgaattacgaatg

SEQ ID NO: 304533 - DNA, 21 bp, Artificial sequence
  SiRNA target sequence
ggaaaatcgaattacgaatga

SEQ ID NO: 304534 - DNA, 21 bp, Artificial sequence
  SiRNA target sequence
gaaaatcgaattacgaatgaa

SEQ ID NO: 304535 - DNA, 21 bp, Artificial sequence
  SiRNA target sequence
aaaatcgaattacgaatgaag

SEQ ID NO: 304536 - DNA, 21 bp, Artificial sequence
  SiRNA target sequence
aaatcgaattacgaatgaagt

SEQ ID NO: 304537 - DNA, 21 bp, Artificial sequence
  SiRNA target sequence
aatcgaattacgaatgaagtg

SEQ ID NO: 304538 - DNA, 21 bp, Artificial sequence
  SiRNA target sequence
atcgaattacgaatgaagtgt

SEQ ID NO: 304539 - DNA, 21 bp, Artificial sequence
  SiRNA target sequence
tcgaattacgaatgaagtgtc

SEQ ID NO: 304540 - DNA, 21 bp, Artificial sequence
  SiRNA target sequence
cgaattacgaatgaagtgtct

SEQ ID NO: 304541 - DNA, 21 bp, Artificial sequence
  SiRNA target sequence
gaattacgaatgaagtgtcta

SEQ ID NO: 304542 - DNA, 21 bp, Artificial sequence
  SiRNA target sequence
aattacgaatgaagtgtctat

SEQ ID NO: 304543 - DNA, 21 bp, Artificial sequence
  SiRNA target sequence
attacgaatgaagtgtctatt

SEQ ID NO: 304544 - DNA, 21 bp, Artificial sequence
  SiRNA target sequence
ttacgaatgaagtgtctattg

SEQ ID NO: 304545 - DNA, 21 bp, Artificial sequence
  SiRNA target sequence
tacgaatgaagtgtctattgg

SEQ ID NO: 304546 - DNA, 21 bp, Artificial sequence
  SiRNA target sequence
acgaatgaagtgtctattgga

SEQ ID NO: 304547 - DNA, 21 bp, Artificial sequence
  SiRNA target sequence
cgaatgaagtgtctattggaa

SEQ ID NO: 304548 - DNA, 21 bp, Artificial sequence
  SiRNA target sequence
gaatgaagtgtctattggaac

SEQ ID NO: 304549 - DNA, 21 bp, Artificial sequence
  SiRNA target sequence
aatgaagtgtctattggaacg

SEQ ID NO: 304550 - DNA, 21 bp, Artificial sequence
  SiRNA target sequence
atgaagtgtctattggaacga

SEQ ID NO: 304551 - DNA, 21 bp, Artificial sequence
  SiRNA target sequence
tgaagtgtctattggaacgaa

SEQ ID NO: 304552 - DNA, 21 bp, Artificial sequence
  SiRNA target sequence
gaagtgtctattggaacgaat

SEQ ID NO: 304553 - DNA, 21 bp, Artificial sequence
  SiRNA target sequence
aagtgtctattggaacgaatg

SEQ ID NO: 304554 - DNA, 21 bp, Artificial sequence
  SiRNA target sequence
agtgtctattggaacgaatgt

SEQ ID NO: 304555 - DNA, 21 bp, Artificial sequence
  SiRNA target sequence
gtgtctattggaacgaatgtt

SEQ ID NO: 304556 - DNA, 21 bp, Artificial sequence
  SiRNA target sequence
tgtctattggaacgaatgttt

SEQ ID NO: 304557 - DNA, 21 bp, Artificial sequence
  SiRNA target sequence
gtctattggaacgaatgttta

SEQ ID NO: 304558 - DNA, 21 bp, Artificial sequence
  SiRNA target sequence
tctattggaacgaatgtttac

SEQ ID NO: 304559 - DNA, 21 bp, Artificial sequence
  SiRNA target sequence
ctattggaacgaatgtttact

SEQ ID NO: 304560 - DNA, 21 bp, Artificial sequence
  SiRNA target sequence
tattggaacgaatgtttactc

SEQ ID NO: 304561 - DNA, 21 bp, Artificial sequence
  SiRNA target sequence
attggaacgaatgtttactca

SEQ ID NO: 304562 - DNA, 21 bp, Artificial sequence
  SiRNA target sequence
ttggaacgaatgtttactcac

SEQ ID NO: 304563 - DNA, 21 bp, Artificial sequence
  SiRNA target sequence
tggaacgaatgtttactcaca

SEQ ID NO: 304564 - DNA, 21 bp, Artificial sequence
  SiRNA target sequence
ggaacgaatgtttactcacaa

SEQ ID NO: 304565 - DNA, 21 bp, Artificial sequence
  SiRNA target sequence
gaacgaatgtttactcacaag

SEQ ID NO: 304566 - DNA, 21 bp, Artificial sequence
  SiRNA target sequence
aacgaatgtttactcacaaga

SEQ ID NO: 304567 - DNA, 21 bp, Artificial sequence
  SiRNA target sequence
acgaatgtttactcacaagac

SEQ ID NO: 304568 - DNA, 21 bp, Artificial sequence
  SiRNA target sequence
cgaatgtttactcacaagact

SEQ ID NO: 304569 - DNA, 21 bp, Artificial sequence
  SiRNA target sequence
gaatgtttactcacaagactg

SEQ ID NO: 304570 - DNA, 21 bp, Artificial sequence
  SiRNA target sequence
aatgtttactcacaagactgg

SEQ ID NO: 304571 - DNA, 21 bp, Artificial sequence
  SiRNA target sequence
atgtttactcacaagactgga

SEQ ID NO: 304572 - DNA, 21 bp, Artificial sequence
  SiRNA target sequence
tgtttactcacaagactggag

SEQ ID NO: 304573 - DNA, 21 bp, Artificial sequence
  SiRNA target sequence
gtttactcacaagactggagt

SEQ ID NO: 304574 - DNA, 21 bp, Artificial sequence
  SiRNA target sequence
tttactcacaagactggagta

SEQ ID NO: 304575 - DNA, 21 bp, Artificial sequence
  SiRNA target sequence
ttactcacaagactggagtaa

SEQ ID NO: 304576 - DNA, 21 bp, Artificial sequence
  SiRNA target sequence
tactcacaagactggagtaaa

SEQ ID NO: 304577 - DNA, 21 bp, Artificial sequence
  SiRNA target sequence
actcacaagactggagtaaaa

SEQ ID NO: 304578 - DNA, 21 bp, Artificial sequence
  SiRNA target sequence
ctcacaagactggagtaaaac

SEQ ID NO: 304579 - DNA, 21 bp, Artificial sequence
  SiRNA target sequence
tcacaagactggagtaaaact

SEQ ID NO: 304580 - DNA, 21 bp, Artificial sequence
  SiRNA target sequence
cacaagactggagtaaaactg

SEQ ID NO: 304581 - DNA, 21 bp, Artificial sequence
  SiRNA target sequence
acaagactggagtaaaactgt

SEQ ID NO: 304582 - DNA, 21 bp, Artificial sequence
  SiRNA target sequence
caagactggagtaaaactgtt

SEQ ID NO: 304583 - DNA, 21 bp, Artificial sequence
  SiRNA target sequence
aagactggagtaaaactgtta

SEQ ID NO: 304584 - DNA, 21 bp, Artificial sequence
  SiRNA target sequence
agactggagtaaaactgttag

SEQ ID NO: 304585 - DNA, 21 bp, Artificial sequence
  SiRNA target sequence
gactggagtaaaactgttagg

SEQ ID NO: 304586 - DNA, 21 bp, Artificial sequence
  SiRNA target sequence
actggagtaaaactgttagga

SEQ ID NO: 304587 - DNA, 21 bp, Artificial sequence
  SiRNA target sequence
ctggagtaaaactgttaggaa

SEQ ID NO: 304588 - DNA, 21 bp, Artificial sequence
  SiRNA target sequence
tggagtaaaactgttaggaaa

SEQ ID NO: 304589 - DNA, 21 bp, Artificial sequence
  SiRNA target sequence
ggagtaaaactgttaggaaat

SEQ ID NO: 304590 - DNA, 21 bp, Artificial sequence
  SiRNA target sequence
gagtaaaactgttaggaaatt

SEQ ID NO: 304591 - DNA, 21 bp, Artificial sequence
  SiRNA target sequence
agtaaaactgttaggaaatta

SEQ ID NO: 304592 - DNA, 21 bp, Artificial sequence
  SiRNA target sequence
gtaaaactgttaggaaattaa

SEQ ID NO: 304593 - DNA, 21 bp, Artificial sequence
  SiRNA target sequence
taaaactgttaggaaattaac

SEQ ID NO: 304594 - DNA, 21 bp, Artificial sequence
  SiRNA target sequence
aaaactgttaggaaattaacc

SEQ ID NO: 304595 - DNA, 21 bp, Artificial sequence
  SiRNA target sequence
aaactgttaggaaattaacca

SEQ ID NO: 304596 - DNA, 21 bp, Artificial sequence
  SiRNA target sequence
aactgttaggaaattaaccaa

SEQ ID NO: 304597 - DNA, 21 bp, Artificial sequence
  SiRNA target sequence
actgttaggaaattaaccaaa

SEQ ID NO: 304598 - DNA, 21 bp, Artificial sequence
  SiRNA target sequence
ctgttaggaaattaaccaaat

SEQ ID NO: 304599 - DNA, 21 bp, Artificial sequence
  SiRNA target sequence
tgttaggaaattaaccaaatt

SEQ ID NO: 304600 - DNA, 21 bp, Artificial sequence
  SiRNA target sequence
gttaggaaattaaccaaattt

SEQ ID NO: 304601 - DNA, 21 bp, Artificial sequence
  SiRNA target sequence
ttaggaaattaaccaaatttg

SEQ ID NO: 304602 - DNA, 21 bp, Artificial sequence
  SiRNA target sequence
taggaaattaaccaaatttgg

SEQ ID NO: 304603 - DNA, 21 bp, Artificial sequence
  SiRNA target sequence
aggaaattaaccaaatttgga

SEQ ID NO: 304604 - DNA, 21 bp, Artificial sequence
  SiRNA target sequence
ggaaattaaccaaatttggaa

SEQ ID NO: 304605 - DNA, 21 bp, Artificial sequence
  SiRNA target sequence
gaaattaaccaaatttggaaa

SEQ ID NO: 304606 - DNA, 21 bp, Artificial sequence
  SiRNA target sequence
aaattaaccaaatttggaaat

SEQ ID NO: 304607 - DNA, 21 bp, Artificial sequence
  SiRNA target sequence
aattaaccaaatttggaaata

SEQ ID NO: 304608 - DNA, 21 bp, Artificial sequence
  SiRNA target sequence
attaaccaaatttggaaataa

SEQ ID NO: 304609 - DNA, 21 bp, Artificial sequence
  SiRNA target sequence
ttaaccaaatttggaaataaa

SEQ ID NO: 304610 - DNA, 21 bp, Artificial sequence
  SiRNA target sequence
taaccaaatttggaaataaag

SEQ ID NO: 304611 - DNA, 21 bp, Artificial sequence
  SiRNA target sequence
aaccaaatttggaaataaagt

SEQ ID NO: 304612 - DNA, 21 bp, Artificial sequence
  SiRNA target sequence
accaaatttggaaataaagta

SEQ ID NO: 304613 - DNA, 21 bp, Artificial sequence
  SiRNA target sequence
ccaaatttggaaataaagtaa

SEQ ID NO: 304614 - DNA, 21 bp, Artificial sequence
  SiRNA target sequence
caaatttggaaataaagtaat

SEQ ID NO: 304615 - DNA, 21 bp, Artificial sequence
  SiRNA target sequence
aaatttggaaataaagtaatt

SEQ ID NO: 304616 - DNA, 21 bp, Artificial sequence
  SiRNA target sequence
aatttggaaataaagtaattg

SEQ ID NO: 304617 - DNA, 21 bp, Artificial sequence
  SiRNA target sequence
atttggaaataaagtaattgc

SEQ ID NO: 304618 - DNA, 21 bp, Artificial sequence
  SiRNA target sequence
tttggaaataaagtaattgct

SEQ ID NO: 304619 - DNA, 21 bp, Artificial sequence
  SiRNA target sequence
ttggaaataaagtaattgctg

SEQ ID NO: 304620 - DNA, 21 bp, Artificial sequence
  SiRNA target sequence
tggaaataaagtaattgctgg

SEQ ID NO: 304621 - DNA, 21 bp, Artificial sequence
  SiRNA target sequence
ggaaataaagtaattgctggt

SEQ ID NO: 304622 - DNA, 21 bp, Artificial sequence
  SiRNA target sequence
gaaataaagtaattgctggtg

SEQ ID NO: 304623 - DNA, 21 bp, Artificial sequence
  SiRNA target sequence
aaataaagtaattgctggtga

SEQ ID NO: 304624 - DNA, 21 bp, Artificial sequence
  SiRNA target sequence
aataaagtaattgctggtgat

SEQ ID NO: 304625 - DNA, 21 bp, Artificial sequence
  SiRNA target sequence
ataaagtaattgctggtgatt

SEQ ID NO: 304626 - DNA, 21 bp, Artificial sequence
  SiRNA target sequence
taaagtaattgctggtgattt

SEQ ID NO: 304627 - DNA, 21 bp, Artificial sequence
  SiRNA target sequence
aaagtaattgctggtgatttt

SEQ ID NO: 304628 - DNA, 21 bp, Artificial sequence
  SiRNA target sequence
aagtaattgctggtgattttt

SEQ ID NO: 304629 - DNA, 21 bp, Artificial sequence
  SiRNA target sequence
agtaattgctggtgatttttc

SEQ ID NO: 304630 - DNA, 21 bp, Artificial sequence
  SiRNA target sequence
gtaattgctggtgatttttca

SEQ ID NO: 304631 - DNA, 21 bp, Artificial sequence
  SiRNA target sequence
taattgctggtgatttttcaa

SEQ ID NO: 304632 - DNA, 21 bp, Artificial sequence
  SiRNA target sequence
aattgctggtgatttttcaac

SEQ ID NO: 304633 - DNA, 21 bp, Artificial sequence
  SiRNA target sequence
attgctggtgatttttcaact

SEQ ID NO: 304634 - DNA, 21 bp, Artificial sequence
  SiRNA target sequence
ttgctggtgatttttcaactt

SEQ ID NO: 304635 - DNA, 21 bp, Artificial sequence
  SiRNA target sequence
tgctggtgatttttcaacttt

SEQ ID NO: 304636 - DNA, 21 bp, Artificial sequence
  SiRNA target sequence
gctggtgatttttcaactttt

SEQ ID NO: 304637 - DNA, 21 bp, Artificial sequence
  SiRNA target sequence
ctggtgatttttcaacttttg

SEQ ID NO: 304638 - DNA, 21 bp, Artificial sequence
  SiRNA target sequence
tggtgatttttcaacttttga

SEQ ID NO: 304639 - DNA, 21 bp, Artificial sequence
  SiRNA target sequence
ggtgatttttcaacttttgat

SEQ ID NO: 304640 - DNA, 21 bp, Artificial sequence
  SiRNA target sequence
gtgatttttcaacttttgatg

SEQ ID NO: 304641 - DNA, 21 bp, Artificial sequence
  SiRNA target sequence
tgatttttcaacttttgatgg

SEQ ID NO: 304642 - DNA, 21 bp, Artificial sequence
  SiRNA target sequence
gatttttcaacttttgatgga

SEQ ID NO: 304643 - DNA, 21 bp, Artificial sequence
  SiRNA target sequence
atttttcaacttttgatggat

SEQ ID NO: 304644 - DNA, 21 bp, Artificial sequence
  SiRNA target sequence
tttttcaacttttgatggatc

SEQ ID NO: 304645 - DNA, 21 bp, Artificial sequence
  SiRNA target sequence
ttttcaacttttgatggatca

SEQ ID NO: 304646 - DNA, 21 bp, Artificial sequence
  SiRNA target sequence
tttcaacttttgatggatcac

SEQ ID NO: 304647 - DNA, 21 bp, Artificial sequence
  SiRNA target sequence
ttcaacttttgatggatcact

SEQ ID NO: 304648 - DNA, 21 bp, Artificial sequence
  SiRNA target sequence
tcaacttttgatggatcacta

SEQ ID NO: 304649 - DNA, 21 bp, Artificial sequence
  SiRNA target sequence
caacttttgatggatcactaa

SEQ ID NO: 304650 - DNA, 21 bp, Artificial sequence
  SiRNA target sequence
aacttttgatggatcactaaa

SEQ ID NO: 304651 - DNA, 21 bp, Artificial sequence
  SiRNA target sequence
acttttgatggatcactaaac

SEQ ID NO: 304652 - DNA, 21 bp, Artificial sequence
  SiRNA target sequence
cttttgatggatcactaaacg

SEQ ID NO: 304653 - DNA, 21 bp, Artificial sequence
  SiRNA target sequence
ttttgatggatcactaaacgt

SEQ ID NO: 304654 - DNA, 21 bp, Artificial sequence
  SiRNA target sequence
tttgatggatcactaaacgtt

SEQ ID NO: 304655 - DNA, 21 bp, Artificial sequence
  SiRNA target sequence
ttgatggatcactaaacgttt

SEQ ID NO: 304656 - DNA, 21 bp, Artificial sequence
  SiRNA target sequence
tgatggatcactaaacgtttg

SEQ ID NO: 304657 - DNA, 21 bp, Artificial sequence
  SiRNA target sequence
gatggatcactaaacgtttgc

SEQ ID NO: 304658 - DNA, 21 bp, Artificial sequence
  SiRNA target sequence
atggatcactaaacgtttgca

SEQ ID NO: 304659 - DNA, 21 bp, Artificial sequence
  SiRNA target sequence
tggatcactaaacgtttgcat

SEQ ID NO: 304660 - DNA, 21 bp, Artificial sequence
  SiRNA target sequence
ggatcactaaacgtttgcatt

SEQ ID NO: 304661 - DNA, 21 bp, Artificial sequence
  SiRNA target sequence
gatcactaaacgtttgcatta

SEQ ID NO: 304662 - DNA, 21 bp, Artificial sequence
  SiRNA target sequence
atcactaaacgtttgcattat

SEQ ID NO: 304663 - DNA, 21 bp, Artificial sequence
  SiRNA target sequence
tcactaaacgtttgcattatg

SEQ ID NO: 304664 - DNA, 21 bp, Artificial sequence
  SiRNA target sequence
cactaaacgtttgcattatgg

SEQ ID NO: 304665 - DNA, 21 bp, Artificial sequence
  SiRNA target sequence
actaaacgtttgcattatgga

SEQ ID NO: 304666 - DNA, 21 bp, Artificial sequence
  SiRNA target sequence
ctaaacgtttgcattatggaa

SEQ ID NO: 304667 - DNA, 21 bp, Artificial sequence
  SiRNA target sequence
taaacgtttgcattatggaaa

SEQ ID NO: 304668 - DNA, 21 bp, Artificial sequence
  SiRNA target sequence
aaacgtttgcattatggaaaa

SEQ ID NO: 304669 - DNA, 21 bp, Artificial sequence
  SiRNA target sequence
aacgtttgcattatggaaaaa

SEQ ID NO: 304670 - DNA, 21 bp, Artificial sequence
  SiRNA target sequence
acgtttgcattatggaaaaat

SEQ ID NO: 304671 - DNA, 21 bp, Artificial sequence
  SiRNA target sequence
cgtttgcattatggaaaaatt

SEQ ID NO: 304672 - DNA, 21 bp, Artificial sequence
  SiRNA target sequence
gtttgcattatggaaaaattt

SEQ ID NO: 304673 - DNA, 21 bp, Artificial sequence
  SiRNA target sequence
tttgcattatggaaaaatttg

SEQ ID NO: 304674 - DNA, 21 bp, Artificial sequence
  SiRNA target sequence
ttgcattatggaaaaatttgc

SEQ ID NO: 304675 - DNA, 21 bp, Artificial sequence
  SiRNA target sequence
tgcattatggaaaaatttgca

SEQ ID NO: 304676 - DNA, 21 bp, Artificial sequence
  SiRNA target sequence
gcattatggaaaaatttgcag

SEQ ID NO: 304677 - DNA, 21 bp, Artificial sequence
  SiRNA target sequence
cattatggaaaaatttgcaga

SEQ ID NO: 304678 - DNA, 21 bp, Artificial sequence
  SiRNA target sequence
attatggaaaaatttgcagat

SEQ ID NO: 304679 - DNA, 21 bp, Artificial sequence
  SiRNA target sequence
ttatggaaaaatttgcagatt

SEQ ID NO: 304680 - DNA, 21 bp, Artificial sequence
  SiRNA target sequence
tatggaaaaatttgcagattt

SEQ ID NO: 304681 - DNA, 21 bp, Artificial sequence
  SiRNA target sequence
atggaaaaatttgcagattta

SEQ ID NO: 304682 - DNA, 21 bp, Artificial sequence
  SiRNA target sequence
tggaaaaatttgcagatttag

SEQ ID NO: 304683 - DNA, 21 bp, Artificial sequence
  SiRNA target sequence
ggaaaaatttgcagatttagc

SEQ ID NO: 304684 - DNA, 21 bp, Artificial sequence
  SiRNA target sequence
gaaaaatttgcagatttagct

SEQ ID NO: 304685 - DNA, 21 bp, Artificial sequence
  SiRNA target sequence
aaaaatttgcagatttagcta

SEQ ID NO: 304686 - DNA, 21 bp, Artificial sequence
  SiRNA target sequence
aaaatttgcagatttagctaa

SEQ ID NO: 304687 - DNA, 21 bp, Artificial sequence
  SiRNA target sequence
aaatttgcagatttagctaat

SEQ ID NO: 304688 - DNA, 21 bp, Artificial sequence
  SiRNA target sequence
aatttgcagatttagctaatg

SEQ ID NO: 304689 - DNA, 21 bp, Artificial sequence
  SiRNA target sequence
atttgcagatttagctaatga

SEQ ID NO: 304690 - DNA, 21 bp, Artificial sequence
  SiRNA target sequence
tttgcagatttagctaatgag

SEQ ID NO: 304691 - DNA, 21 bp, Artificial sequence
  SiRNA target sequence
ttgcagatttagctaatgagt

SEQ ID NO: 304692 - DNA, 21 bp, Artificial sequence
  SiRNA target sequence
tgcagatttagctaatgagtt

SEQ ID NO: 304693 - DNA, 21 bp, Artificial sequence
  SiRNA target sequence
gcagatttagctaatgagttt

SEQ ID NO: 304694 - DNA, 21 bp, Artificial sequence
  SiRNA target sequence
cagatttagctaatgagtttt

SEQ ID NO: 304695 - DNA, 21 bp, Artificial sequence
  SiRNA target sequence
agatttagctaatgagtttta

SEQ ID NO: 304696 - DNA, 21 bp, Artificial sequence
  SiRNA target sequence
gatttagctaatgagttttac

SEQ ID NO: 304697 - DNA, 21 bp, Artificial sequence
  SiRNA target sequence
atttagctaatgagttttacg

SEQ ID NO: 304698 - DNA, 21 bp, Artificial sequence
  SiRNA target sequence
tttagctaatgagttttacga

SEQ ID NO: 304699 - DNA, 21 bp, Artificial sequence
  SiRNA target sequence
ttagctaatgagttttacgat

SEQ ID NO: 304700 - DNA, 21 bp, Artificial sequence
  SiRNA target sequence
tagctaatgagttttacgatg

SEQ ID NO: 304701 - DNA, 21 bp, Artificial sequence
  SiRNA target sequence
agctaatgagttttacgatga

SEQ ID NO: 304702 - DNA, 21 bp, Artificial sequence
  SiRNA target sequence
gctaatgagttttacgatgac

SEQ ID NO: 304703 - DNA, 21 bp, Artificial sequence
  SiRNA target sequence
ctaatgagttttacgatgacg

SEQ ID NO: 304704 - DNA, 21 bp, Artificial sequence
  SiRNA target sequence
taatgagttttacgatgacgg

SEQ ID NO: 304705 - DNA, 21 bp, Artificial sequence
  SiRNA target sequence
aatgagttttacgatgacgga

SEQ ID NO: 304706 - DNA, 21 bp, Artificial sequence
  SiRNA target sequence
atgagttttacgatgacggac

SEQ ID NO: 304707 - DNA, 21 bp, Artificial sequence
  SiRNA target sequence
tgagttttacgatgacggacc

SEQ ID NO: 304708 - DNA, 21 bp, Artificial sequence
  SiRNA target sequence
gagttttacgatgacggaccg

SEQ ID NO: 304709 - DNA, 21 bp, Artificial sequence
  SiRNA target sequence
agttttacgatgacggaccgg

SEQ ID NO: 304710 - DNA, 21 bp, Artificial sequence
  SiRNA target sequence
gttttacgatgacggaccgga

SEQ ID NO: 304711 - DNA, 21 bp, Artificial sequence
  SiRNA target sequence
ttttacgatgacggaccggaa

SEQ ID NO: 304712 - DNA, 21 bp, Artificial sequence
  SiRNA target sequence
tttacgatgacggaccggaaa

SEQ ID NO: 304713 - DNA, 21 bp, Artificial sequence
  SiRNA target sequence
ttacgatgacggaccggaaaa

SEQ ID NO: 304714 - DNA, 21 bp, Artificial sequence
  SiRNA target sequence
tacgatgacggaccggaaaat

SEQ ID NO: 304715 - DNA, 21 bp, Artificial sequence
  SiRNA target sequence
acgatgacggaccggaaaatg

SEQ ID NO: 304716 - DNA, 21 bp, Artificial sequence
  SiRNA target sequence
cgatgacggaccggaaaatgc

SEQ ID NO: 304717 - DNA, 21 bp, Artificial sequence
  SiRNA target sequence
gatgacggaccggaaaatgct

SEQ ID NO: 304718 - DNA, 21 bp, Artificial sequence
  SiRNA target sequence
atgacggaccggaaaatgctt

SEQ ID NO: 304719 - DNA, 21 bp, Artificial sequence
  SiRNA target sequence
tgacggaccggaaaatgcttt

SEQ ID NO: 304720 - DNA, 21 bp, Artificial sequence
  SiRNA target sequence
gacggaccggaaaatgctttg

SEQ ID NO: 304721 - DNA, 21 bp, Artificial sequence
  SiRNA target sequence
acggaccggaaaatgctttga

SEQ ID NO: 304722 - DNA, 21 bp, Artificial sequence
  SiRNA target sequence
cggaccggaaaatgctttgat

SEQ ID NO: 304723 - DNA, 21 bp, Artificial sequence
  SiRNA target sequence
ggaccggaaaatgctttgata

SEQ ID NO: 304724 - DNA, 21 bp, Artificial sequence
  SiRNA target sequence
gaccggaaaatgctttgatac

SEQ ID NO: 304725 - DNA, 21 bp, Artificial sequence
  SiRNA target sequence
accggaaaatgctttgatacg

SEQ ID NO: 304726 - DNA, 21 bp, Artificial sequence
  SiRNA target sequence
ccggaaaatgctttgatacgt

SEQ ID NO: 304727 - DNA, 21 bp, Artificial sequence
  SiRNA target sequence
cggaaaatgctttgatacgtc

SEQ ID NO: 304728 - DNA, 21 bp, Artificial sequence
  SiRNA target sequence
ggaaaatgctttgatacgtca

SEQ ID NO: 304729 - DNA, 21 bp, Artificial sequence
  SiRNA target sequence
gaaaatgctttgatacgtcat

SEQ ID NO: 304730 - DNA, 21 bp, Artificial sequence
  SiRNA target sequence
aaaatgctttgatacgtcatg

SEQ ID NO: 304731 - DNA, 21 bp, Artificial sequence
  SiRNA target sequence
aaatgctttgatacgtcatgt

SEQ ID NO: 304732 - DNA, 21 bp, Artificial sequence
  SiRNA target sequence
aatgctttgatacgtcatgtt

SEQ ID NO: 304733 - DNA, 21 bp, Artificial sequence
  SiRNA target sequence
atgctttgatacgtcatgttc

SEQ ID NO: 304734 - DNA, 21 bp, Artificial sequence
  SiRNA target sequence
tgctttgatacgtcatgttct

SEQ ID NO: 304735 - DNA, 21 bp, Artificial sequence
  SiRNA target sequence
gctttgatacgtcatgttcta

SEQ ID NO: 304736 - DNA, 21 bp, Artificial sequence
  SiRNA target sequence
ctttgatacgtcatgttctat

SEQ ID NO: 304737 - DNA, 21 bp, Artificial sequence
  SiRNA target sequence
tttgatacgtcatgttctatt

SEQ ID NO: 304738 - DNA, 21 bp, Artificial sequence
  SiRNA target sequence
ttgatacgtcatgttctattg

SEQ ID NO: 304739 - DNA, 21 bp, Artificial sequence
  SiRNA target sequence
tgatacgtcatgttctattga

SEQ ID NO: 304740 - DNA, 21 bp, Artificial sequence
  SiRNA target sequence
gatacgtcatgttctattgat

SEQ ID NO: 304741 - DNA, 21 bp, Artificial sequence
  SiRNA target sequence
atacgtcatgttctattgatg

SEQ ID NO: 304742 - DNA, 21 bp, Artificial sequence
  SiRNA target sequence
tacgtcatgttctattgatgg

SEQ ID NO: 304743 - DNA, 21 bp, Artificial sequence
  SiRNA target sequence
acgtcatgttctattgatgga

SEQ ID NO: 304744 - DNA, 21 bp, Artificial sequence
  SiRNA target sequence
cgtcatgttctattgatggat

SEQ ID NO: 304745 - DNA, 21 bp, Artificial sequence
  SiRNA target sequence
gtcatgttctattgatggatg

SEQ ID NO: 304746 - DNA, 21 bp, Artificial sequence
  SiRNA target sequence
tcatgttctattgatggatgt

SEQ ID NO: 304747 - DNA, 21 bp, Artificial sequence
  SiRNA target sequence
catgttctattgatggatgtg

SEQ ID NO: 304748 - DNA, 21 bp, Artificial sequence
  SiRNA target sequence
atgttctattgatggatgtgt

SEQ ID NO: 304749 - DNA, 21 bp, Artificial sequence
  SiRNA target sequence
tgttctattgatggatgtgta

SEQ ID NO: 304750 - DNA, 21 bp, Artificial sequence
  SiRNA target sequence
gttctattgatggatgtgtac

SEQ ID NO: 304751 - DNA, 21 bp, Artificial sequence
  SiRNA target sequence
ttctattgatggatgtgtaca

SEQ ID NO: 304752 - DNA, 21 bp, Artificial sequence
  SiRNA target sequence
tctattgatggatgtgtacaa

SEQ ID NO: 304753 - DNA, 21 bp, Artificial sequence
  SiRNA target sequence
ctattgatggatgtgtacaat

SEQ ID NO: 304754 - DNA, 21 bp, Artificial sequence
  SiRNA target sequence
tattgatggatgtgtacaatt

SEQ ID NO: 304755 - DNA, 21 bp, Artificial sequence
  SiRNA target sequence
attgatggatgtgtacaattc

SEQ ID NO: 304756 - DNA, 21 bp, Artificial sequence
  SiRNA target sequence
ttgatggatgtgtacaattct

SEQ ID NO: 304757 - DNA, 21 bp, Artificial sequence
  SiRNA target sequence
tgatggatgtgtacaattctg

SEQ ID NO: 304758 - DNA, 21 bp, Artificial sequence
  SiRNA target sequence
gatggatgtgtacaattctgt

SEQ ID NO: 304759 - DNA, 21 bp, Artificial sequence
  SiRNA target sequence
atggatgtgtacaattctgta

SEQ ID NO: 304760 - DNA, 21 bp, Artificial sequence
  SiRNA target sequence
tggatgtgtacaattctgtac

SEQ ID NO: 304761 - DNA, 21 bp, Artificial sequence
  SiRNA target sequence
ggatgtgtacaattctgtaca

SEQ ID NO: 304762 - DNA, 21 bp, Artificial sequence
  SiRNA target sequence
gatgtgtacaattctgtacat

SEQ ID NO: 304763 - DNA, 21 bp, Artificial sequence
  SiRNA target sequence
atgtgtacaattctgtacatg

SEQ ID NO: 304764 - DNA, 21 bp, Artificial sequence
  SiRNA target sequence
tgtgtacaattctgtacatgt

SEQ ID NO: 304765 - DNA, 21 bp, Artificial sequence
  SiRNA target sequence
gtgtacaattctgtacatgtc

SEQ ID NO: 304766 - DNA, 21 bp, Artificial sequence
  SiRNA target sequence
tgtacaattctgtacatgtct

SEQ ID NO: 304767 - DNA, 21 bp, Artificial sequence
  SiRNA target sequence
gtacaattctgtacatgtctg

SEQ ID NO: 304768 - DNA, 21 bp, Artificial sequence
  SiRNA target sequence
tacaattctgtacatgtctgt

SEQ ID NO: 304769 - DNA, 21 bp, Artificial sequence
  SiRNA target sequence
acaattctgtacatgtctgta

SEQ ID NO: 304770 - DNA, 21 bp, Artificial sequence
  SiRNA target sequence
caattctgtacatgtctgtaa

SEQ ID NO: 304771 - DNA, 21 bp, Artificial sequence
  SiRNA target sequence
aattctgtacatgtctgtaat

SEQ ID NO: 304772 - DNA, 21 bp, Artificial sequence
  SiRNA target sequence
attctgtacatgtctgtaatg

SEQ ID NO: 304773 - DNA, 21 bp, Artificial sequence
  SiRNA target sequence
ttctgtacatgtctgtaatga

SEQ ID NO: 304774 - DNA, 21 bp, Artificial sequence
  SiRNA target sequence
tctgtacatgtctgtaatgat

SEQ ID NO: 304775 - DNA, 21 bp, Artificial sequence
  SiRNA target sequence
ctgtacatgtctgtaatgatt

SEQ ID NO: 304776 - DNA, 21 bp, Artificial sequence
  SiRNA target sequence
tgtacatgtctgtaatgattc

SEQ ID NO: 304777 - DNA, 21 bp, Artificial sequence
  SiRNA target sequence
gtacatgtctgtaatgattca

SEQ ID NO: 304778 - DNA, 21 bp, Artificial sequence
  SiRNA target sequence
tacatgtctgtaatgattcag

SEQ ID NO: 304779 - DNA, 21 bp, Artificial sequence
  SiRNA target sequence
acatgtctgtaatgattcagt

SEQ ID NO: 304780 - DNA, 21 bp, Artificial sequence
  SiRNA target sequence
catgtctgtaatgattcagta

SEQ ID NO: 304781 - DNA, 21 bp, Artificial sequence
  SiRNA target sequence
atgtctgtaatgattcagtat

SEQ ID NO: 304782 - DNA, 21 bp, Artificial sequence
  SiRNA target sequence
tgtctgtaatgattcagtata

SEQ ID NO: 304783 - DNA, 21 bp, Artificial sequence
  SiRNA target sequence
gtctgtaatgattcagtatac

SEQ ID NO: 304784 - DNA, 21 bp, Artificial sequence
  SiRNA target sequence
tctgtaatgattcagtataca

SEQ ID NO: 304785 - DNA, 21 bp, Artificial sequence
  SiRNA target sequence
ctgtaatgattcagtatacat

SEQ ID NO: 304786 - DNA, 21 bp, Artificial sequence
  SiRNA target sequence
tgtaatgattcagtatacatg

SEQ ID NO: 304787 - DNA, 21 bp, Artificial sequence
  SiRNA target sequence
gtaatgattcagtatacatga

SEQ ID NO: 304788 - DNA, 21 bp, Artificial sequence
  SiRNA target sequence
taatgattcagtatacatgat

SEQ ID NO: 304789 - DNA, 21 bp, Artificial sequence
  SiRNA target sequence
aatgattcagtatacatgatg

SEQ ID NO: 304790 - DNA, 21 bp, Artificial sequence
  SiRNA target sequence
atgattcagtatacatgatga

SEQ ID NO: 304791 - DNA, 21 bp, Artificial sequence
  SiRNA target sequence
tgattcagtatacatgatgac

SEQ ID NO: 304792 - DNA, 21 bp, Artificial sequence
  SiRNA target sequence
gattcagtatacatgatgact

SEQ ID NO: 304793 - DNA, 21 bp, Artificial sequence
  SiRNA target sequence
attcagtatacatgatgactc

SEQ ID NO: 304794 - DNA, 21 bp, Artificial sequence
  SiRNA target sequence
ttcagtatacatgatgactca

SEQ ID NO: 304795 - DNA, 21 bp, Artificial sequence
  SiRNA target sequence
tcagtatacatgatgactcat

SEQ ID NO: 304796 - DNA, 21 bp, Artificial sequence
  SiRNA target sequence
cagtatacatgatgactcata

SEQ ID NO: 304797 - DNA, 21 bp, Artificial sequence
  SiRNA target sequence
agtatacatgatgactcatag

SEQ ID NO: 304798 - DNA, 21 bp, Artificial sequence
  SiRNA target sequence
gtatacatgatgactcatagc

SEQ ID NO: 304799 - DNA, 21 bp, Artificial sequence
  SiRNA target sequence
tatacatgatgactcatagcc

SEQ ID NO: 304800 - DNA, 21 bp, Artificial sequence
  SiRNA target sequence
atacatgatgactcatagcca

SEQ ID NO: 304801 - DNA, 21 bp, Artificial sequence
  SiRNA target sequence
tacatgatgactcatagccaa

SEQ ID NO: 304802 - DNA, 21 bp, Artificial sequence
  SiRNA target sequence
acatgatgactcatagccaac

SEQ ID NO: 304803 - DNA, 21 bp, Artificial sequence
  SiRNA target sequence
catgatgactcatagccaacc

SEQ ID NO: 304804 - DNA, 21 bp, Artificial sequence
  SiRNA target sequence
atgatgactcatagccaacct

SEQ ID NO: 304805 - DNA, 21 bp, Artificial sequence
  SiRNA target sequence
tgatgactcatagccaacctt

SEQ ID NO: 304806 - DNA, 21 bp, Artificial sequence
  SiRNA target sequence
gatgactcatagccaaccttc

SEQ ID NO: 304807 - DNA, 21 bp, Artificial sequence
  SiRNA target sequence
atgactcatagccaaccttca

SEQ ID NO: 304808 - DNA, 21 bp, Artificial sequence
  SiRNA target sequence
tgactcatagccaaccttcag

SEQ ID NO: 304809 - DNA, 21 bp, Artificial sequence
  SiRNA target sequence
gactcatagccaaccttcagg

SEQ ID NO: 304810 - DNA, 21 bp, Artificial sequence
  SiRNA target sequence
actcatagccaaccttcagga

SEQ ID NO: 304811 - DNA, 21 bp, Artificial sequence
  SiRNA target sequence
ctcatagccaaccttcaggaa

SEQ ID NO: 304812 - DNA, 21 bp, Artificial sequence
  SiRNA target sequence
tcatagccaaccttcaggaaa

SEQ ID NO: 304813 - DNA, 21 bp, Artificial sequence
  SiRNA target sequence
catagccaaccttcaggaaac

SEQ ID NO: 304814 - DNA, 21 bp, Artificial sequence
  SiRNA target sequence
atagccaaccttcaggaaacc

SEQ ID NO: 304815 - DNA, 21 bp, Artificial sequence
  SiRNA target sequence
tagccaaccttcaggaaaccc

SEQ ID NO: 304816 - DNA, 21 bp, Artificial sequence
  SiRNA target sequence
agccaaccttcaggaaacccc

SEQ ID NO: 304817 - DNA, 21 bp, Artificial sequence
  SiRNA target sequence
gccaaccttcaggaaaccccg

SEQ ID NO: 304818 - DNA, 21 bp, Artificial sequence
  SiRNA target sequence
ccaaccttcaggaaaccccgc

SEQ ID NO: 304819 - DNA, 21 bp, Artificial sequence
  SiRNA target sequence
caaccttcaggaaaccccgca

SEQ ID NO: 304820 - DNA, 21 bp, Artificial sequence
  SiRNA target sequence
aaccttcaggaaaccccgcaa

SEQ ID NO: 304821 - DNA, 21 bp, Artificial sequence
  SiRNA target sequence
accttcaggaaaccccgcaac

SEQ ID NO: 304822 - DNA, 21 bp, Artificial sequence
  SiRNA target sequence
ccttcaggaaaccccgcaaca

SEQ ID NO: 304823 - DNA, 21 bp, Artificial sequence
  SiRNA target sequence
cttcaggaaaccccgcaacaa

SEQ ID NO: 304824 - DNA, 21 bp, Artificial sequence
  SiRNA target sequence
ttcaggaaaccccgcaacaac

SEQ ID NO: 304825 - DNA, 21 bp, Artificial sequence
  SiRNA target sequence
tcaggaaaccccgcaacaaca

SEQ ID NO: 304826 - DNA, 21 bp, Artificial sequence
  SiRNA target sequence
caggaaaccccgcaacaacac

SEQ ID NO: 304827 - DNA, 21 bp, Artificial sequence
  SiRNA target sequence
aggaaaccccgcaacaacacc

SEQ ID NO: 304828 - DNA, 21 bp, Artificial sequence
  SiRNA target sequence
ggaaaccccgcaacaacaccc

SEQ ID NO: 304829 - DNA, 21 bp, Artificial sequence
  SiRNA target sequence
gaaaccccgcaacaacacccc

SEQ ID NO: 304830 - DNA, 21 bp, Artificial sequence
  SiRNA target sequence
aaaccccgcaacaacacccct

SEQ ID NO: 304831 - DNA, 21 bp, Artificial sequence
  SiRNA target sequence
aaccccgcaacaacacccctt

SEQ ID NO: 304832 - DNA, 21 bp, Artificial sequence
  SiRNA target sequence
accccgcaacaacacccctta

SEQ ID NO: 304833 - DNA, 21 bp, Artificial sequence
  SiRNA target sequence
ccccgcaacaacaccccttaa

SEQ ID NO: 304834 - DNA, 21 bp, Artificial sequence
  SiRNA target sequence
cccgcaacaacaccccttaac

SEQ ID NO: 304835 - DNA, 21 bp, Artificial sequence
  SiRNA target sequence
ccgcaacaacaccccttaact

SEQ ID NO: 304836 - DNA, 21 bp, Artificial sequence
  SiRNA target sequence
cgcaacaacaccccttaactg

SEQ ID NO: 304837 - DNA, 21 bp, Artificial sequence
  SiRNA target sequence
gcaacaacaccccttaactgt

SEQ ID NO: 304838 - DNA, 21 bp, Artificial sequence
  SiRNA target sequence
caacaacaccccttaactgtt

SEQ ID NO: 304839 - DNA, 21 bp, Artificial sequence
  SiRNA target sequence
aacaacaccccttaactgttt

SEQ ID NO: 304840 - DNA, 21 bp, Artificial sequence
  SiRNA target sequence
acaacaccccttaactgtttc

SEQ ID NO: 304841 - DNA, 21 bp, Artificial sequence
  SiRNA target sequence
caacaccccttaactgtttca

SEQ ID NO: 304842 - DNA, 21 bp, Artificial sequence
  SiRNA target sequence
aacaccccttaactgtttcat

SEQ ID NO: 304843 - DNA, 21 bp, Artificial sequence
  SiRNA target sequence
acaccccttaactgtttcatt

SEQ ID NO: 304844 - DNA, 21 bp, Artificial sequence
  SiRNA target sequence
caccccttaactgtttcatta

SEQ ID NO: 304845 - DNA, 21 bp, Artificial sequence
  SiRNA target sequence
accccttaactgtttcattaa

SEQ ID NO: 304846 - DNA, 21 bp, Artificial sequence
  SiRNA target sequence
ccccttaactgtttcattaat

SEQ ID NO: 304847 - DNA, 21 bp, Artificial sequence
  SiRNA target sequence
cccttaactgtttcattaata

SEQ ID NO: 304848 - DNA, 21 bp, Artificial sequence
  SiRNA target sequence
ccttaactgtttcattaatag

SEQ ID NO: 304849 - DNA, 21 bp, Artificial sequence
  SiRNA target sequence
cttaactgtttcattaatagc

SEQ ID NO: 304850 - DNA, 21 bp, Artificial sequence
  SiRNA target sequence
ttaactgtttcattaatagca

SEQ ID NO: 304851 - DNA, 21 bp, Artificial sequence
  SiRNA target sequence
taactgtttcattaatagcat

SEQ ID NO: 304852 - DNA, 21 bp, Artificial sequence
  SiRNA target sequence
aactgtttcattaatagcatg

SEQ ID NO: 304853 - DNA, 21 bp, Artificial sequence
  SiRNA target sequence
actgtttcattaatagcatgg

SEQ ID NO: 304854 - DNA, 21 bp, Artificial sequence
  SiRNA target sequence
ctgtttcattaatagcatggg

SEQ ID NO: 304855 - DNA, 21 bp, Artificial sequence
  SiRNA target sequence
tgtttcattaatagcatggga

SEQ ID NO: 304856 - DNA, 21 bp, Artificial sequence
  SiRNA target sequence
gtttcattaatagcatgggat

SEQ ID NO: 304857 - DNA, 21 bp, Artificial sequence
  SiRNA target sequence
tttcattaatagcatgggatt

SEQ ID NO: 304858 - DNA, 21 bp, Artificial sequence
  SiRNA target sequence
ttcattaatagcatgggattg

SEQ ID NO: 304859 - DNA, 21 bp, Artificial sequence
  SiRNA target sequence
tcattaatagcatgggattga

SEQ ID NO: 304860 - DNA, 21 bp, Artificial sequence
  SiRNA target sequence
cattaatagcatgggattgag

SEQ ID NO: 304861 - DNA, 21 bp, Artificial sequence
  SiRNA target sequence
attaatagcatgggattgaga

SEQ ID NO: 304862 - DNA, 21 bp, Artificial sequence
  SiRNA target sequence
ttaatagcatgggattgagaa

SEQ ID NO: 304863 - DNA, 21 bp, Artificial sequence
  SiRNA target sequence
taatagcatgggattgagaat

SEQ ID NO: 304864 - DNA, 21 bp, Artificial sequence
  SiRNA target sequence
aatagcatgggattgagaatg

SEQ ID NO: 304865 - DNA, 21 bp, Artificial sequence
  SiRNA target sequence
atagcatgggattgagaatgt

SEQ ID NO: 304866 - DNA, 21 bp, Artificial sequence
  SiRNA target sequence
tagcatgggattgagaatgtg

SEQ ID NO: 304867 - DNA, 21 bp, Artificial sequence
  SiRNA target sequence
agcatgggattgagaatgtgt

SEQ ID NO: 304868 - DNA, 21 bp, Artificial sequence
  SiRNA target sequence
gcatgggattgagaatgtgtt

SEQ ID NO: 304869 - DNA, 21 bp, Artificial sequence
  SiRNA target sequence
catgggattgagaatgtgttt

SEQ ID NO: 304870 - DNA, 21 bp, Artificial sequence
  SiRNA target sequence
atgggattgagaatgtgtttc

SEQ ID NO: 304871 - DNA, 21 bp, Artificial sequence
  SiRNA target sequence
tgggattgagaatgtgtttct

SEQ ID NO: 304872 - DNA, 21 bp, Artificial sequence
  SiRNA target sequence
gggattgagaatgtgtttctc

SEQ ID NO: 304873 - DNA, 21 bp, Artificial sequence
  SiRNA target sequence
ggattgagaatgtgtttctca

SEQ ID NO: 304874 - DNA, 21 bp, Artificial sequence
  SiRNA target sequence
gattgagaatgtgtttctcaa

SEQ ID NO: 304875 - DNA, 21 bp, Artificial sequence
  SiRNA target sequence
attgagaatgtgtttctcaat

SEQ ID NO: 304876 - DNA, 21 bp, Artificial sequence
  SiRNA target sequence
ttgagaatgtgtttctcaatt

SEQ ID NO: 304877 - DNA, 21 bp, Artificial sequence
  SiRNA target sequence
tgagaatgtgtttctcaattt

SEQ ID NO: 304878 - DNA, 21 bp, Artificial sequence
  SiRNA target sequence
gagaatgtgtttctcaatttg

SEQ ID NO: 304879 - DNA, 21 bp, Artificial sequence
  SiRNA target sequence
agaatgtgtttctcaatttgt

SEQ ID NO: 304880 - DNA, 21 bp, Artificial sequence
  SiRNA target sequence
gaatgtgtttctcaatttgtg

SEQ ID NO: 304881 - DNA, 21 bp, Artificial sequence
  SiRNA target sequence
aatgtgtttctcaatttgtgc

SEQ ID NO: 304882 - DNA, 21 bp, Artificial sequence
  SiRNA target sequence
atgtgtttctcaatttgtgct

SEQ ID NO: 304883 - DNA, 21 bp, Artificial sequence
  SiRNA target sequence
tgtgtttctcaatttgtgcta

SEQ ID NO: 304884 - DNA, 21 bp, Artificial sequence
  SiRNA target sequence
gtgtttctcaatttgtgctac

SEQ ID NO: 304885 - DNA, 21 bp, Artificial sequence
  SiRNA target sequence
tgtttctcaatttgtgctact

SEQ ID NO: 304886 - DNA, 21 bp, Artificial sequence
  SiRNA target sequence
gtttctcaatttgtgctacta

SEQ ID NO: 304887 - DNA, 21 bp, Artificial sequence
  SiRNA target sequence
tttctcaatttgtgctactaa

SEQ ID NO: 304888 - DNA, 21 bp, Artificial sequence
  SiRNA target sequence
ttctcaatttgtgctactaaa

SEQ ID NO: 304889 - DNA, 21 bp, Artificial sequence
  SiRNA target sequence
tctcaatttgtgctactaaag

SEQ ID NO: 304890 - DNA, 21 bp, Artificial sequence
  SiRNA target sequence
ctcaatttgtgctactaaagc

SEQ ID NO: 304891 - DNA, 21 bp, Artificial sequence
  SiRNA target sequence
tcaatttgtgctactaaagca

SEQ ID NO: 304892 - DNA, 21 bp, Artificial sequence
  SiRNA target sequence
caatttgtgctactaaagcag

SEQ ID NO: 304893 - DNA, 21 bp, Artificial sequence
  SiRNA target sequence
aatttgtgctactaaagcagc

SEQ ID NO: 304894 - DNA, 21 bp, Artificial sequence
  SiRNA target sequence
atttgtgctactaaagcagcg

SEQ ID NO: 304895 - DNA, 21 bp, Artificial sequence
  SiRNA target sequence
tttgtgctactaaagcagcgg

SEQ ID NO: 304896 - DNA, 21 bp, Artificial sequence
  SiRNA target sequence
ttgtgctactaaagcagcggt

SEQ ID NO: 304897 - DNA, 21 bp, Artificial sequence
  SiRNA target sequence
tgtgctactaaagcagcggtt

SEQ ID NO: 304898 - DNA, 21 bp, Artificial sequence
  SiRNA target sequence
gtgctactaaagcagcggtta

SEQ ID NO: 304899 - DNA, 21 bp, Artificial sequence
  SiRNA target sequence
tgctactaaagcagcggttaa

SEQ ID NO: 304900 - DNA, 21 bp, Artificial sequence
  SiRNA target sequence
gctactaaagcagcggttaaa

SEQ ID NO: 304901 - DNA, 21 bp, Artificial sequence
  SiRNA target sequence
ctactaaagcagcggttaaaa

SEQ ID NO: 304902 - DNA, 21 bp, Artificial sequence
  SiRNA target sequence
tactaaagcagcggttaaaat

SEQ ID NO: 304903 - DNA, 21 bp, Artificial sequence
  SiRNA target sequence
actaaagcagcggttaaaatg

SEQ ID NO: 304904 - DNA, 21 bp, Artificial sequence
  SiRNA target sequence
ctaaagcagcggttaaaatga

SEQ ID NO: 304905 - DNA, 21 bp, Artificial sequence
  SiRNA target sequence
taaagcagcggttaaaatgac

SEQ ID NO: 304906 - DNA, 21 bp, Artificial sequence
  SiRNA target sequence
aaagcagcggttaaaatgacg

SEQ ID NO: 304907 - DNA, 21 bp, Artificial sequence
  SiRNA target sequence
aagcagcggttaaaatgacga

SEQ ID NO: 304908 - DNA, 21 bp, Artificial sequence
  SiRNA target sequence
agcagcggttaaaatgacgat

SEQ ID NO: 304909 - DNA, 21 bp, Artificial sequence
  SiRNA target sequence
gcagcggttaaaatgacgatg

SEQ ID NO: 304910 - DNA, 21 bp, Artificial sequence
  SiRNA target sequence
cagcggttaaaatgacgatga

SEQ ID NO: 304911 - DNA, 21 bp, Artificial sequence
  SiRNA target sequence
agcggttaaaatgacgatgag

SEQ ID NO: 304912 - DNA, 21 bp, Artificial sequence
  SiRNA target sequence
gcggttaaaatgacgatgaga

SEQ ID NO: 304913 - DNA, 21 bp, Artificial sequence
  SiRNA target sequence
cggttaaaatgacgatgagag

SEQ ID NO: 304914 - DNA, 21 bp, Artificial sequence
  SiRNA target sequence
ggttaaaatgacgatgagaga

SEQ ID NO: 304915 - DNA, 21 bp, Artificial sequence
  SiRNA target sequence
gttaaaatgacgatgagagat

SEQ ID NO: 304916 - DNA, 21 bp, Artificial sequence
  SiRNA target sequence
ttaaaatgacgatgagagatt

SEQ ID NO: 304917 - DNA, 21 bp, Artificial sequence
  SiRNA target sequence
taaaatgacgatgagagattt

SEQ ID NO: 304918 - DNA, 21 bp, Artificial sequence
  SiRNA target sequence
aaaatgacgatgagagatttt

SEQ ID NO: 304919 - DNA, 21 bp, Artificial sequence
  SiRNA target sequence
aaatgacgatgagagatttta

SEQ ID NO: 304920 - DNA, 21 bp, Artificial sequence
  SiRNA target sequence
aatgacgatgagagattttag

SEQ ID NO: 304921 - DNA, 21 bp, Artificial sequence
  SiRNA target sequence
atgacgatgagagattttagt

SEQ ID NO: 304922 - DNA, 21 bp, Artificial sequence
  SiRNA target sequence
tgacgatgagagattttagta

SEQ ID NO: 304923 - DNA, 21 bp, Artificial sequence
  SiRNA target sequence
gacgatgagagattttagtaa

SEQ ID NO: 304924 - DNA, 21 bp, Artificial sequence
  SiRNA target sequence
acgatgagagattttagtaaa

SEQ ID NO: 304925 - DNA, 21 bp, Artificial sequence
  SiRNA target sequence
cgatgagagattttagtaaac

SEQ ID NO: 304926 - DNA, 21 bp, Artificial sequence
  SiRNA target sequence
gatgagagattttagtaaaca

SEQ ID NO: 304927 - DNA, 21 bp, Artificial sequence
  SiRNA target sequence
atgagagattttagtaaacat

SEQ ID NO: 304928 - DNA, 21 bp, Artificial sequence
  SiRNA target sequence
tgagagattttagtaaacatg

SEQ ID NO: 304929 - DNA, 21 bp, Artificial sequence
  SiRNA target sequence
gagagattttagtaaacatgt

SEQ ID NO: 304930 - DNA, 21 bp, Artificial sequence
  SiRNA target sequence
agagattttagtaaacatgtt

SEQ ID NO: 304931 - DNA, 21 bp, Artificial sequence
  SiRNA target sequence
gagattttagtaaacatgttt

SEQ ID NO: 304932 - DNA, 21 bp, Artificial sequence
  SiRNA target sequence
agattttagtaaacatgtttc

SEQ ID NO: 304933 - DNA, 21 bp, Artificial sequence
  SiRNA target sequence
gattttagtaaacatgtttcc

SEQ ID NO: 304934 - DNA, 21 bp, Artificial sequence
  SiRNA target sequence
attttagtaaacatgtttccc

SEQ ID NO: 304935 - DNA, 21 bp, Artificial sequence
  SiRNA target sequence
ttttagtaaacatgtttccct

SEQ ID NO: 304936 - DNA, 21 bp, Artificial sequence
  SiRNA target sequence
tttagtaaacatgtttccctc

SEQ ID NO: 304937 - DNA, 21 bp, Artificial sequence
  SiRNA target sequence
ttagtaaacatgtttccctcg

SEQ ID NO: 304938 - DNA, 21 bp, Artificial sequence
  SiRNA target sequence
tagtaaacatgtttccctcgt

SEQ ID NO: 304939 - DNA, 21 bp, Artificial sequence
  SiRNA target sequence
agtaaacatgtttccctcgtc

SEQ ID NO: 304940 - DNA, 21 bp, Artificial sequence
  SiRNA target sequence
gtaaacatgtttccctcgtct

SEQ ID NO: 304941 - DNA, 21 bp, Artificial sequence
  SiRNA target sequence
taaacatgtttccctcgtctc

SEQ ID NO: 304942 - DNA, 21 bp, Artificial sequence
  SiRNA target sequence
aaacatgtttccctcgtctct

SEQ ID NO: 304943 - DNA, 21 bp, Artificial sequence
  SiRNA target sequence
aacatgtttccctcgtctctt

SEQ ID NO: 304944 - DNA, 21 bp, Artificial sequence
  SiRNA target sequence
acatgtttccctcgtctctta

SEQ ID NO: 304945 - DNA, 21 bp, Artificial sequence
  SiRNA target sequence
catgtttccctcgtctcttat

SEQ ID NO: 304946 - DNA, 21 bp, Artificial sequence
  SiRNA target sequence
atgtttccctcgtctcttatg

SEQ ID NO: 304947 - DNA, 21 bp, Artificial sequence
  SiRNA target sequence
tgtttccctcgtctcttatgg

SEQ ID NO: 304948 - DNA, 21 bp, Artificial sequence
  SiRNA target sequence
gtttccctcgtctcttatgga

SEQ ID NO: 304949 - DNA, 21 bp, Artificial sequence
  SiRNA target sequence
tttccctcgtctcttatggag

SEQ ID NO: 304950 - DNA, 21 bp, Artificial sequence
  SiRNA target sequence
ttccctcgtctcttatggaga

SEQ ID NO: 304951 - DNA, 21 bp, Artificial sequence
  SiRNA target sequence
tccctcgtctcttatggagat

SEQ ID NO: 304952 - DNA, 21 bp, Artificial sequence
  SiRNA target sequence
ccctcgtctcttatggagatg

SEQ ID NO: 304953 - DNA, 21 bp, Artificial sequence
  SiRNA target sequence
cctcgtctcttatggagatga

SEQ ID NO: 304954 - DNA, 21 bp, Artificial sequence
  SiRNA target sequence
ctcgtctcttatggagatgat

SEQ ID NO: 304955 - DNA, 21 bp, Artificial sequence
  SiRNA target sequence
tcgtctcttatggagatgata

SEQ ID NO: 304956 - DNA, 21 bp, Artificial sequence
  SiRNA target sequence
cgtctcttatggagatgataa

SEQ ID NO: 304957 - DNA, 21 bp, Artificial sequence
  SiRNA target sequence
gtctcttatggagatgataat

SEQ ID NO: 304958 - DNA, 21 bp, Artificial sequence
  SiRNA target sequence
tctcttatggagatgataatg

SEQ ID NO: 304959 - DNA, 21 bp, Artificial sequence
  SiRNA target sequence
ctcttatggagatgataatgt

SEQ ID NO: 304960 - DNA, 21 bp, Artificial sequence
  SiRNA target sequence
tcttatggagatgataatgta

SEQ ID NO: 304961 - DNA, 21 bp, Artificial sequence
  SiRNA target sequence
cttatggagatgataatgtaa

SEQ ID NO: 304962 - DNA, 21 bp, Artificial sequence
  SiRNA target sequence
ttatggagatgataatgtaat

SEQ ID NO: 304963 - DNA, 21 bp, Artificial sequence
  SiRNA target sequence
tatggagatgataatgtaatt

SEQ ID NO: 304964 - DNA, 21 bp, Artificial sequence
  SiRNA target sequence
atggagatgataatgtaatta

SEQ ID NO: 304965 - DNA, 21 bp, Artificial sequence
  SiRNA target sequence
tggagatgataatgtaattaa

SEQ ID NO: 304966 - DNA, 21 bp, Artificial sequence
  SiRNA target sequence
ggagatgataatgtaattaac

SEQ ID NO: 304967 - DNA, 21 bp, Artificial sequence
  SiRNA target sequence
gagatgataatgtaattaact

SEQ ID NO: 304968 - DNA, 21 bp, Artificial sequence
  SiRNA target sequence
agatgataatgtaattaactt

SEQ ID NO: 304969 - DNA, 21 bp, Artificial sequence
  SiRNA target sequence
gatgataatgtaattaacttc

SEQ ID NO: 304970 - DNA, 21 bp, Artificial sequence
  SiRNA target sequence
atgataatgtaattaacttca

SEQ ID NO: 304971 - DNA, 21 bp, Artificial sequence
  SiRNA target sequence
tgataatgtaattaacttcag

SEQ ID NO: 304972 - DNA, 21 bp, Artificial sequence
  SiRNA target sequence
gataatgtaattaacttcagt

SEQ ID NO: 304973 - DNA, 21 bp, Artificial sequence
  SiRNA target sequence
ataatgtaattaacttcagtg

SEQ ID NO: 304974 - DNA, 21 bp, Artificial sequence
  SiRNA target sequence
taatgtaattaacttcagtga

SEQ ID NO: 304975 - DNA, 21 bp, Artificial sequence
  SiRNA target sequence
aatgtaattaacttcagtgat

SEQ ID NO: 304976 - DNA, 21 bp, Artificial sequence
  SiRNA target sequence
atgtaattaacttcagtgatg

SEQ ID NO: 304977 - DNA, 21 bp, Artificial sequence
  SiRNA target sequence
tgtaattaacttcagtgatga

SEQ ID NO: 304978 - DNA, 21 bp, Artificial sequence
  SiRNA target sequence
gtaattaacttcagtgatgaa

SEQ ID NO: 304979 - DNA, 21 bp, Artificial sequence
  SiRNA target sequence
taattaacttcagtgatgaag

SEQ ID NO: 304980 - DNA, 21 bp, Artificial sequence
  SiRNA target sequence
aattaacttcagtgatgaagt

SEQ ID NO: 304981 - DNA, 21 bp, Artificial sequence
  SiRNA target sequence
attaacttcagtgatgaagtt

SEQ ID NO: 304982 - DNA, 21 bp, Artificial sequence
  SiRNA target sequence
ttaacttcagtgatgaagtta

SEQ ID NO: 304983 - DNA, 21 bp, Artificial sequence
  SiRNA target sequence
taacttcagtgatgaagttag

SEQ ID NO: 304984 - DNA, 21 bp, Artificial sequence
  SiRNA target sequence
aacttcagtgatgaagttagt

SEQ ID NO: 304985 - DNA, 21 bp, Artificial sequence
  SiRNA target sequence
acttcagtgatgaagttagtg

SEQ ID NO: 304986 - DNA, 21 bp, Artificial sequence
  SiRNA target sequence
cttcagtgatgaagttagtgc

SEQ ID NO: 304987 - DNA, 21 bp, Artificial sequence
  SiRNA target sequence
ttcagtgatgaagttagtgca

SEQ ID NO: 304988 - DNA, 21 bp, Artificial sequence
  SiRNA target sequence
tcagtgatgaagttagtgcat

SEQ ID NO: 304989 - DNA, 21 bp, Artificial sequence
  SiRNA target sequence
cagtgatgaagttagtgcatg

SEQ ID NO: 304990 - DNA, 21 bp, Artificial sequence
  SiRNA target sequence
agtgatgaagttagtgcatgg

SEQ ID NO: 304991 - DNA, 21 bp, Artificial sequence
  SiRNA target sequence
gtgatgaagttagtgcatggt

SEQ ID NO: 304992 - DNA, 21 bp, Artificial sequence
  SiRNA target sequence
tgatgaagttagtgcatggta

SEQ ID NO: 304993 - DNA, 21 bp, Artificial sequence
  SiRNA target sequence
gatgaagttagtgcatggtat

SEQ ID NO: 304994 - DNA, 21 bp, Artificial sequence
  SiRNA target sequence
atgaagttagtgcatggtata

SEQ ID NO: 304995 - DNA, 21 bp, Artificial sequence
  SiRNA target sequence
tgaagttagtgcatggtataa

SEQ ID NO: 304996 - DNA, 21 bp, Artificial sequence
  SiRNA target sequence
gaagttagtgcatggtataac

SEQ ID NO: 304997 - DNA, 21 bp, Artificial sequence
  SiRNA target sequence
aagttagtgcatggtataaca

SEQ ID NO: 304998 - DNA, 21 bp, Artificial sequence
  SiRNA target sequence
agttagtgcatggtataacat

SEQ ID NO: 304999 - DNA, 21 bp, Artificial sequence
  SiRNA target sequence
gttagtgcatggtataacatg

SEQ ID NO: 305000 - DNA, 21 bp, Artificial sequence
  SiRNA target sequence
ttagtgcatggtataacatgt

SEQ ID NO: 305001 - DNA, 21 bp, Artificial sequence
  SiRNA target sequence
tagtgcatggtataacatgtc

SEQ ID NO: 305002 - DNA, 21 bp, Artificial sequence
  SiRNA target sequence
agtgcatggtataacatgtct

SEQ ID NO: 305003 - DNA, 21 bp, Artificial sequence
  SiRNA target sequence
gtgcatggtataacatgtcta

SEQ ID NO: 305004 - DNA, 21 bp, Artificial sequence
  SiRNA target sequence
tgcatggtataacatgtctac

SEQ ID NO: 305005 - DNA, 21 bp, Artificial sequence
  SiRNA target sequence
gcatggtataacatgtctact

SEQ ID NO: 305006 - DNA, 21 bp, Artificial sequence
  SiRNA target sequence
catggtataacatgtctacta

SEQ ID NO: 305007 - DNA, 21 bp, Artificial sequence
  SiRNA target sequence
atggtataacatgtctactat

SEQ ID NO: 305008 - DNA, 21 bp, Artificial sequence
  SiRNA target sequence
tggtataacatgtctactatt

SEQ ID NO: 305009 - DNA, 21 bp, Artificial sequence
  SiRNA target sequence
ggtataacatgtctactattg

SEQ ID NO: 305010 - DNA, 21 bp, Artificial sequence
  SiRNA target sequence
gtataacatgtctactattgc

SEQ ID NO: 305011 - DNA, 21 bp, Artificial sequence
  SiRNA target sequence
tataacatgtctactattgca

SEQ ID NO: 305012 - DNA, 21 bp, Artificial sequence
  SiRNA target sequence
ataacatgtctactattgcag

SEQ ID NO: 305013 - DNA, 21 bp, Artificial sequence
  SiRNA target sequence
taacatgtctactattgcaga

SEQ ID NO: 305014 - DNA, 21 bp, Artificial sequence
  SiRNA target sequence
aacatgtctactattgcagag

SEQ ID NO: 305015 - DNA, 21 bp, Artificial sequence
  SiRNA target sequence
acatgtctactattgcagagg

SEQ ID NO: 305016 - DNA, 21 bp, Artificial sequence
  SiRNA target sequence
catgtctactattgcagaggc

SEQ ID NO: 305017 - DNA, 21 bp, Artificial sequence
  SiRNA target sequence
atgtctactattgcagaggct

SEQ ID NO: 305018 - DNA, 21 bp, Artificial sequence
  SiRNA target sequence
tgtctactattgcagaggctt

SEQ ID NO: 305019 - DNA, 21 bp, Artificial sequence
  SiRNA target sequence
gtctactattgcagaggcttt

SEQ ID NO: 305020 - DNA, 21 bp, Artificial sequence
  SiRNA target sequence
tctactattgcagaggctttt

SEQ ID NO: 305021 - DNA, 21 bp, Artificial sequence
  SiRNA target sequence
ctactattgcagaggcttttt

SEQ ID NO: 305022 - DNA, 21 bp, Artificial sequence
  SiRNA target sequence
tactattgcagaggctttttc

SEQ ID NO: 305023 - DNA, 21 bp, Artificial sequence
  SiRNA target sequence
actattgcagaggctttttca

SEQ ID NO: 305024 - DNA, 21 bp, Artificial sequence
  SiRNA target sequence
ctattgcagaggctttttcaa

SEQ ID NO: 305025 - DNA, 21 bp, Artificial sequence
  SiRNA target sequence
tattgcagaggctttttcaac

SEQ ID NO: 305026 - DNA, 21 bp, Artificial sequence
  SiRNA target sequence
attgcagaggctttttcaaca

SEQ ID NO: 305027 - DNA, 21 bp, Artificial sequence
  SiRNA target sequence
ttgcagaggctttttcaacac

SEQ ID NO: 305028 - DNA, 21 bp, Artificial sequence
  SiRNA target sequence
tgcagaggctttttcaacact

SEQ ID NO: 305029 - DNA, 21 bp, Artificial sequence
  SiRNA target sequence
gcagaggctttttcaacactt

SEQ ID NO: 305030 - DNA, 21 bp, Artificial sequence
  SiRNA target sequence
cagaggctttttcaacacttg

SEQ ID NO: 305031 - DNA, 21 bp, Artificial sequence
  SiRNA target sequence
agaggctttttcaacacttgg

SEQ ID NO: 305032 - DNA, 21 bp, Artificial sequence
  SiRNA target sequence
gaggctttttcaacacttgga

SEQ ID NO: 305033 - DNA, 21 bp, Artificial sequence
  SiRNA target sequence
aggctttttcaacacttggat

SEQ ID NO: 305034 - DNA, 21 bp, Artificial sequence
  SiRNA target sequence
ggctttttcaacacttggatt

SEQ ID NO: 305035 - DNA, 21 bp, Artificial sequence
  SiRNA target sequence
gctttttcaacacttggattc

SEQ ID NO: 305036 - DNA, 21 bp, Artificial sequence
  SiRNA target sequence
ctttttcaacacttggattca

SEQ ID NO: 305037 - DNA, 21 bp, Artificial sequence
  SiRNA target sequence
tttttcaacacttggattcac

SEQ ID NO: 305038 - DNA, 21 bp, Artificial sequence
  SiRNA target sequence
ttttcaacacttggattcact

SEQ ID NO: 305039 - DNA, 21 bp, Artificial sequence
  SiRNA target sequence
tttcaacacttggattcactt

SEQ ID NO: 305040 - DNA, 21 bp, Artificial sequence
  SiRNA target sequence
ttcaacacttggattcactta

SEQ ID NO: 305041 - DNA, 21 bp, Artificial sequence
  SiRNA target sequence
tcaacacttggattcacttat

SEQ ID NO: 305042 - DNA, 21 bp, Artificial sequence
  SiRNA target sequence
caacacttggattcacttata

SEQ ID NO: 305043 - DNA, 21 bp, Artificial sequence
  SiRNA target sequence
aacacttggattcacttatac

SEQ ID NO: 305044 - DNA, 21 bp, Artificial sequence
  SiRNA target sequence
acacttggattcacttataca

SEQ ID NO: 305045 - DNA, 21 bp, Artificial sequence
  SiRNA target sequence
cacttggattcacttatacag

SEQ ID NO: 305046 - DNA, 21 bp, Artificial sequence
  SiRNA target sequence
acttggattcacttatacaga

SEQ ID NO: 305047 - DNA, 21 bp, Artificial sequence
  SiRNA target sequence
cttggattcacttatacagat

SEQ ID NO: 305048 - DNA, 21 bp, Artificial sequence
  SiRNA target sequence
ttggattcacttatacagatg

SEQ ID NO: 305049 - DNA, 21 bp, Artificial sequence
  SiRNA target sequence
tggattcacttatacagatga

SEQ ID NO: 305050 - DNA, 21 bp, Artificial sequence
  SiRNA target sequence
ggattcacttatacagatgag

SEQ ID NO: 305051 - DNA, 21 bp, Artificial sequence
  SiRNA target sequence
gattcacttatacagatgagc

SEQ ID NO: 305052 - DNA, 21 bp, Artificial sequence
  SiRNA target sequence
attcacttatacagatgagct

SEQ ID NO: 305053 - DNA, 21 bp, Artificial sequence
  SiRNA target sequence
ttcacttatacagatgagctc

SEQ ID NO: 305054 - DNA, 21 bp, Artificial sequence
  SiRNA target sequence
tcacttatacagatgagctca

SEQ ID NO: 305055 - DNA, 21 bp, Artificial sequence
  SiRNA target sequence
cacttatacagatgagctcaa

SEQ ID NO: 305056 - DNA, 21 bp, Artificial sequence
  SiRNA target sequence
acttatacagatgagctcaag

SEQ ID NO: 305057 - DNA, 21 bp, Artificial sequence
  SiRNA target sequence
cttatacagatgagctcaagg

SEQ ID NO: 305058 - DNA, 21 bp, Artificial sequence
  SiRNA target sequence
ttatacagatgagctcaaggg

SEQ ID NO: 305059 - DNA, 21 bp, Artificial sequence
  SiRNA target sequence
tatacagatgagctcaaggga

SEQ ID NO: 305060 - DNA, 21 bp, Artificial sequence
  SiRNA target sequence
atacagatgagctcaagggag

SEQ ID NO: 305061 - DNA, 21 bp, Artificial sequence
  SiRNA target sequence
tacagatgagctcaagggagt

SEQ ID NO: 305062 - DNA, 21 bp, Artificial sequence
  SiRNA target sequence
acagatgagctcaagggagtt

SEQ ID NO: 305063 - DNA, 21 bp, Artificial sequence
  SiRNA target sequence
cagatgagctcaagggagtta

SEQ ID NO: 305064 - DNA, 21 bp, Artificial sequence
  SiRNA target sequence
agatgagctcaagggagttag

SEQ ID NO: 305065 - DNA, 21 bp, Artificial sequence
  SiRNA target sequence
gatgagctcaagggagttaga

SEQ ID NO: 305066 - DNA, 21 bp, Artificial sequence
  SiRNA target sequence
atgagctcaagggagttagag

SEQ ID NO: 305067 - DNA, 21 bp, Artificial sequence
  SiRNA target sequence
tgagctcaagggagttagagg

SEQ ID NO: 305068 - DNA, 21 bp, Artificial sequence
  SiRNA target sequence
gagctcaagggagttagaggc

SEQ ID NO: 305069 - DNA, 21 bp, Artificial sequence
  SiRNA target sequence
agctcaagggagttagaggcg

SEQ ID NO: 305070 - DNA, 21 bp, Artificial sequence
  SiRNA target sequence
gctcaagggagttagaggcga

SEQ ID NO: 305071 - DNA, 21 bp, Artificial sequence
  SiRNA target sequence
ctcaagggagttagaggcgag

SEQ ID NO: 305072 - DNA, 21 bp, Artificial sequence
  SiRNA target sequence
tcaagggagttagaggcgagg

SEQ ID NO: 305073 - DNA, 21 bp, Artificial sequence
  SiRNA target sequence
caagggagttagaggcgaggt

SEQ ID NO: 305074 - DNA, 21 bp, Artificial sequence
  SiRNA target sequence
aagggagttagaggcgaggta

SEQ ID NO: 305075 - DNA, 21 bp, Artificial sequence
  SiRNA target sequence
agggagttagaggcgaggtac

SEQ ID NO: 305076 - DNA, 21 bp, Artificial sequence
  SiRNA target sequence
gggagttagaggcgaggtacc

SEQ ID NO: 305077 - DNA, 21 bp, Artificial sequence
  SiRNA target sequence
ggagttagaggcgaggtacca

SEQ ID NO: 305078 - DNA, 21 bp, Artificial sequence
  SiRNA target sequence
gagttagaggcgaggtaccaa

SEQ ID NO: 305079 - DNA, 21 bp, Artificial sequence
  SiRNA target sequence
agttagaggcgaggtaccaaa

SEQ ID NO: 305080 - DNA, 21 bp, Artificial sequence
  SiRNA target sequence
gttagaggcgaggtaccaaat

SEQ ID NO: 305081 - DNA, 21 bp, Artificial sequence
  SiRNA target sequence
ttagaggcgaggtaccaaatt

SEQ ID NO: 305082 - DNA, 21 bp, Artificial sequence
  SiRNA target sequence
tagaggcgaggtaccaaattg

SEQ ID NO: 305083 - DNA, 21 bp, Artificial sequence
  SiRNA target sequence
agaggcgaggtaccaaattgg

SEQ ID NO: 305084 - DNA, 21 bp, Artificial sequence
  SiRNA target sequence
gaggcgaggtaccaaattggc

SEQ ID NO: 305085 - DNA, 21 bp, Artificial sequence
  SiRNA target sequence
aggcgaggtaccaaattggcg

SEQ ID NO: 305086 - DNA, 21 bp, Artificial sequence
  SiRNA target sequence
ggcgaggtaccaaattggcga

SEQ ID NO: 305087 - DNA, 21 bp, Artificial sequence
  SiRNA target sequence
gcgaggtaccaaattggcgat

SEQ ID NO: 305088 - DNA, 21 bp, Artificial sequence
  SiRNA target sequence
cgaggtaccaaattggcgatc

SEQ ID NO: 305089 - DNA, 21 bp, Artificial sequence
  SiRNA target sequence
gaggtaccaaattggcgatca

SEQ ID NO: 305090 - DNA, 21 bp, Artificial sequence
  SiRNA target sequence
aggtaccaaattggcgatcaa

SEQ ID NO: 305091 - DNA, 21 bp, Artificial sequence
  SiRNA target sequence
ggtaccaaattggcgatcaat

SEQ ID NO: 305092 - DNA, 21 bp, Artificial sequence
  SiRNA target sequence
gtaccaaattggcgatcaata

SEQ ID NO: 305093 - DNA, 21 bp, Artificial sequence
  SiRNA target sequence
taccaaattggcgatcaatac

SEQ ID NO: 305094 - DNA, 21 bp, Artificial sequence
  SiRNA target sequence
accaaattggcgatcaataca

SEQ ID NO: 305095 - DNA, 21 bp, Artificial sequence
  SiRNA target sequence
ccaaattggcgatcaatacag

SEQ ID NO: 305096 - DNA, 21 bp, Artificial sequence
  SiRNA target sequence
caaattggcgatcaatacagg

SEQ ID NO: 305097 - DNA, 21 bp, Artificial sequence
  SiRNA target sequence
aaattggcgatcaatacagga

SEQ ID NO: 305098 - DNA, 21 bp, Artificial sequence
  SiRNA target sequence
aattggcgatcaatacaggac

SEQ ID NO: 305099 - DNA, 21 bp, Artificial sequence
  SiRNA target sequence
attggcgatcaatacaggacg

SEQ ID NO: 305100 - DNA, 21 bp, Artificial sequence
  SiRNA target sequence
ttggcgatcaatacaggacgt

SEQ ID NO: 305101 - DNA, 21 bp, Artificial sequence
  SiRNA target sequence
tggcgatcaatacaggacgtg

SEQ ID NO: 305102 - DNA, 21 bp, Artificial sequence
  SiRNA target sequence
ggcgatcaatacaggacgtgc

SEQ ID NO: 305103 - DNA, 21 bp, Artificial sequence
  SiRNA target sequence
gcgatcaatacaggacgtgca

SEQ ID NO: 305104 - DNA, 21 bp, Artificial sequence
  SiRNA target sequence
cgatcaatacaggacgtgcaa

SEQ ID NO: 305105 - DNA, 21 bp, Artificial sequence
  SiRNA target sequence
gatcaatacaggacgtgcaat

SEQ ID NO: 305106 - DNA, 21 bp, Artificial sequence
  SiRNA target sequence
atcaatacaggacgtgcaata

SEQ ID NO: 305107 - DNA, 21 bp, Artificial sequence
  SiRNA target sequence
tcaatacaggacgtgcaatat

SEQ ID NO: 305108 - DNA, 21 bp, Artificial sequence
  SiRNA target sequence
caatacaggacgtgcaatatc

SEQ ID NO: 305109 - DNA, 21 bp, Artificial sequence
  SiRNA target sequence
aatacaggacgtgcaatatct

SEQ ID NO: 305110 - DNA, 21 bp, Artificial sequence
  SiRNA target sequence
atacaggacgtgcaatatctt

SEQ ID NO: 305111 - DNA, 21 bp, Artificial sequence
  SiRNA target sequence
tacaggacgtgcaatatctta

SEQ ID NO: 305112 - DNA, 21 bp, Artificial sequence
  SiRNA target sequence
acaggacgtgcaatatcttaa

SEQ ID NO: 305113 - DNA, 21 bp, Artificial sequence
  SiRNA target sequence
caggacgtgcaatatcttaaa

SEQ ID NO: 305114 - DNA, 21 bp, Artificial sequence
  SiRNA target sequence
aggacgtgcaatatcttaaac

SEQ ID NO: 305115 - DNA, 21 bp, Artificial sequence
  SiRNA target sequence
ggacgtgcaatatcttaaacg

SEQ ID NO: 305116 - DNA, 21 bp, Artificial sequence
  SiRNA target sequence
gacgtgcaatatcttaaacgt

SEQ ID NO: 305117 - DNA, 21 bp, Artificial sequence
  SiRNA target sequence
acgtgcaatatcttaaacgta

SEQ ID NO: 305118 - DNA, 21 bp, Artificial sequence
  SiRNA target sequence
cgtgcaatatcttaaacgtaa

SEQ ID NO: 305119 - DNA, 21 bp, Artificial sequence
  SiRNA target sequence
gtgcaatatcttaaacgtaag

SEQ ID NO: 305120 - DNA, 21 bp, Artificial sequence
  SiRNA target sequence
tgcaatatcttaaacgtaagt

SEQ ID NO: 305121 - DNA, 21 bp, Artificial sequence
  SiRNA target sequence
gcaatatcttaaacgtaagtt

SEQ ID NO: 305122 - DNA, 21 bp, Artificial sequence
  SiRNA target sequence
caatatcttaaacgtaagttt

SEQ ID NO: 305123 - DNA, 21 bp, Artificial sequence
  SiRNA target sequence
aatatcttaaacgtaagttta

SEQ ID NO: 305124 - DNA, 21 bp, Artificial sequence
  SiRNA target sequence
atatcttaaacgtaagtttag

SEQ ID NO: 305125 - DNA, 21 bp, Artificial sequence
  SiRNA target sequence
tatcttaaacgtaagtttaga

SEQ ID NO: 305126 - DNA, 21 bp, Artificial sequence
  SiRNA target sequence
atcttaaacgtaagtttagat

SEQ ID NO: 305127 - DNA, 21 bp, Artificial sequence
  SiRNA target sequence
tcttaaacgtaagtttagata

SEQ ID NO: 305128 - DNA, 21 bp, Artificial sequence
  SiRNA target sequence
cttaaacgtaagtttagatat

SEQ ID NO: 305129 - DNA, 21 bp, Artificial sequence
  SiRNA target sequence
ttaaacgtaagtttagatatg

SEQ ID NO: 305130 - DNA, 21 bp, Artificial sequence
  SiRNA target sequence
taaacgtaagtttagatatga

SEQ ID NO: 305131 - DNA, 21 bp, Artificial sequence
  SiRNA target sequence
aaacgtaagtttagatatgac

SEQ ID NO: 305132 - DNA, 21 bp, Artificial sequence
  SiRNA target sequence
aacgtaagtttagatatgaca

SEQ ID NO: 305133 - DNA, 21 bp, Artificial sequence
  SiRNA target sequence
acgtaagtttagatatgacaa

SEQ ID NO: 305134 - DNA, 21 bp, Artificial sequence
  SiRNA target sequence
cgtaagtttagatatgacaat

SEQ ID NO: 305135 - DNA, 21 bp, Artificial sequence
  SiRNA target sequence
gtaagtttagatatgacaatc

SEQ ID NO: 305136 - DNA, 21 bp, Artificial sequence
  SiRNA target sequence
taagtttagatatgacaatca

SEQ ID NO: 305137 - DNA, 21 bp, Artificial sequence
  SiRNA target sequence
aagtttagatatgacaatcaa

SEQ ID NO: 305138 - DNA, 21 bp, Artificial sequence
  SiRNA target sequence
agtttagatatgacaatcaac

SEQ ID NO: 305139 - DNA, 21 bp, Artificial sequence
  SiRNA target sequence
gtttagatatgacaatcaacg

SEQ ID NO: 305140 - DNA, 21 bp, Artificial sequence
  SiRNA target sequence
tttagatatgacaatcaacgg

SEQ ID NO: 305141 - DNA, 21 bp, Artificial sequence
  SiRNA target sequence
ttagatatgacaatcaacgga

SEQ ID NO: 305142 - DNA, 21 bp, Artificial sequence
  SiRNA target sequence
tagatatgacaatcaacggaa

SEQ ID NO: 305143 - DNA, 21 bp, Artificial sequence
  SiRNA target sequence
agatatgacaatcaacggaaa

SEQ ID NO: 305144 - DNA, 21 bp, Artificial sequence
  SiRNA target sequence
gatatgacaatcaacggaaag

SEQ ID NO: 305145 - DNA, 21 bp, Artificial sequence
  SiRNA target sequence
atatgacaatcaacggaaagt

SEQ ID NO: 305146 - DNA, 21 bp, Artificial sequence
  SiRNA target sequence
tatgacaatcaacggaaagtt

SEQ ID NO: 305147 - DNA, 21 bp, Artificial sequence
  SiRNA target sequence
atgacaatcaacggaaagttt

SEQ ID NO: 305148 - DNA, 21 bp, Artificial sequence
  SiRNA target sequence
tgacaatcaacggaaagtttg

SEQ ID NO: 305149 - DNA, 21 bp, Artificial sequence
  SiRNA target sequence
gacaatcaacggaaagtttgg

SEQ ID NO: 305150 - DNA, 21 bp, Artificial sequence
  SiRNA target sequence
acaatcaacggaaagtttggg

SEQ ID NO: 305151 - DNA, 21 bp, Artificial sequence
  SiRNA target sequence
caatcaacggaaagtttggga

SEQ ID NO: 305152 - DNA, 21 bp, Artificial sequence
  SiRNA target sequence
aatcaacggaaagtttgggaa

SEQ ID NO: 305153 - DNA, 21 bp, Artificial sequence
  SiRNA target sequence
atcaacggaaagtttgggaag

SEQ ID NO: 305154 - DNA, 21 bp, Artificial sequence
  SiRNA target sequence
tcaacggaaagtttgggaagc

SEQ ID NO: 305155 - DNA, 21 bp, Artificial sequence
  SiRNA target sequence
caacggaaagtttgggaagct

SEQ ID NO: 305156 - DNA, 21 bp, Artificial sequence
  SiRNA target sequence
aacggaaagtttgggaagctc

SEQ ID NO: 305157 - DNA, 21 bp, Artificial sequence
  SiRNA target sequence
acggaaagtttgggaagctcc

SEQ ID NO: 305158 - DNA, 21 bp, Artificial sequence
  SiRNA target sequence
cggaaagtttgggaagctcca

SEQ ID NO: 305159 - DNA, 21 bp, Artificial sequence
  SiRNA target sequence
ggaaagtttgggaagctccat

SEQ ID NO: 305160 - DNA, 21 bp, Artificial sequence
  SiRNA target sequence
gaaagtttgggaagctccatt

SEQ ID NO: 305161 - DNA, 21 bp, Artificial sequence
  SiRNA target sequence
aaagtttgggaagctccattg

SEQ ID NO: 305162 - DNA, 21 bp, Artificial sequence
  SiRNA target sequence
aagtttgggaagctccattgt

SEQ ID NO: 305163 - DNA, 21 bp, Artificial sequence
  SiRNA target sequence
agtttgggaagctccattgtg

SEQ ID NO: 305164 - DNA, 21 bp, Artificial sequence
  SiRNA target sequence
gtttgggaagctccattgtgt

SEQ ID NO: 305165 - DNA, 21 bp, Artificial sequence
  SiRNA target sequence
tttgggaagctccattgtgta

SEQ ID NO: 305166 - DNA, 21 bp, Artificial sequence
  SiRNA target sequence
ttgggaagctccattgtgtat

SEQ ID NO: 305167 - DNA, 21 bp, Artificial sequence
  SiRNA target sequence
tgggaagctccattgtgtatg

SEQ ID NO: 305168 - DNA, 21 bp, Artificial sequence
  SiRNA target sequence
gggaagctccattgtgtatgg

SEQ ID NO: 305169 - DNA, 21 bp, Artificial sequence
  SiRNA target sequence
ggaagctccattgtgtatgga

SEQ ID NO: 305170 - DNA, 21 bp, Artificial sequence
  SiRNA target sequence
gaagctccattgtgtatggac

SEQ ID NO: 305171 - DNA, 21 bp, Artificial sequence
  SiRNA target sequence
aagctccattgtgtatggaca

SEQ ID NO: 305172 - DNA, 21 bp, Artificial sequence
  SiRNA target sequence
agctccattgtgtatggacac

SEQ ID NO: 305173 - DNA, 21 bp, Artificial sequence
  SiRNA target sequence
gctccattgtgtatggacacg

SEQ ID NO: 305174 - DNA, 21 bp, Artificial sequence
  SiRNA target sequence
ctccattgtgtatggacacga

SEQ ID NO: 305175 - DNA, 21 bp, Artificial sequence
  SiRNA target sequence
tccattgtgtatggacacgat

SEQ ID NO: 305176 - DNA, 21 bp, Artificial sequence
  SiRNA target sequence
ccattgtgtatggacacgatt

SEQ ID NO: 305177 - DNA, 21 bp, Artificial sequence
  SiRNA target sequence
cattgtgtatggacacgattc

SEQ ID NO: 305178 - DNA, 21 bp, Artificial sequence
  SiRNA target sequence
attgtgtatggacacgattct

SEQ ID NO: 305179 - DNA, 21 bp, Artificial sequence
  SiRNA target sequence
ttgtgtatggacacgattctt

SEQ ID NO: 305180 - DNA, 21 bp, Artificial sequence
  SiRNA target sequence
tgtgtatggacacgattcttg

SEQ ID NO: 305181 - DNA, 21 bp, Artificial sequence
  SiRNA target sequence
gtgtatggacacgattcttga

SEQ ID NO: 305182 - DNA, 21 bp, Artificial sequence
  SiRNA target sequence
tgtatggacacgattcttgaa

SEQ ID NO: 305183 - DNA, 21 bp, Artificial sequence
  SiRNA target sequence
gtatggacacgattcttgaaa

SEQ ID NO: 305184 - DNA, 21 bp, Artificial sequence
  SiRNA target sequence
tatggacacgattcttgaaat

SEQ ID NO: 305185 - DNA, 21 bp, Artificial sequence
  SiRNA target sequence
atggacacgattcttgaaatg

SEQ ID NO: 305186 - DNA, 21 bp, Artificial sequence
  SiRNA target sequence
tggacacgattcttgaaatgc

SEQ ID NO: 305187 - DNA, 21 bp, Artificial sequence
  SiRNA target sequence
ggacacgattcttgaaatgcc

SEQ ID NO: 305188 - DNA, 21 bp, Artificial sequence
  SiRNA target sequence
gacacgattcttgaaatgcct

SEQ ID NO: 305189 - DNA, 21 bp, Artificial sequence
  SiRNA target sequence
acacgattcttgaaatgccta

SEQ ID NO: 305190 - DNA, 21 bp, Artificial sequence
  SiRNA target sequence
cacgattcttgaaatgcctaa

SEQ ID NO: 305191 - DNA, 21 bp, Artificial sequence
  SiRNA target sequence
acgattcttgaaatgcctaat

SEQ ID NO: 305192 - DNA, 21 bp, Artificial sequence
  SiRNA target sequence
cgattcttgaaatgcctaatt

SEQ ID NO: 305193 - DNA, 21 bp, Artificial sequence
  SiRNA target sequence
gattcttgaaatgcctaattg

SEQ ID NO: 305194 - DNA, 21 bp, Artificial sequence
  SiRNA target sequence
attcttgaaatgcctaattgg

SEQ ID NO: 305195 - DNA, 21 bp, Artificial sequence
  SiRNA target sequence
ttcttgaaatgcctaattggt

SEQ ID NO: 305196 - DNA, 21 bp, Artificial sequence
  SiRNA target sequence
tcttgaaatgcctaattggtg

SEQ ID NO: 305197 - DNA, 21 bp, Artificial sequence
  SiRNA target sequence
cttgaaatgcctaattggtgt

SEQ ID NO: 305198 - DNA, 21 bp, Artificial sequence
  SiRNA target sequence
ttgaaatgcctaattggtgtc

SEQ ID NO: 305199 - DNA, 21 bp, Artificial sequence
  SiRNA target sequence
tgaaatgcctaattggtgtcg

SEQ ID NO: 305200 - DNA, 21 bp, Artificial sequence
  SiRNA target sequence
gaaatgcctaattggtgtcga

SEQ ID NO: 305201 - DNA, 21 bp, Artificial sequence
  SiRNA target sequence
aaatgcctaattggtgtcgag

SEQ ID NO: 305202 - DNA, 21 bp, Artificial sequence
  SiRNA target sequence
aatgcctaattggtgtcgagg

SEQ ID NO: 305203 - DNA, 21 bp, Artificial sequence
  SiRNA target sequence
atgcctaattggtgtcgagga

SEQ ID NO: 305204 - DNA, 21 bp, Artificial sequence
  SiRNA target sequence
tgcctaattggtgtcgaggag

SEQ ID NO: 305205 - DNA, 21 bp, Artificial sequence
  SiRNA target sequence
gcctaattggtgtcgaggagg

SEQ ID NO: 305206 - DNA, 21 bp, Artificial sequence
  SiRNA target sequence
cctaattggtgtcgaggagga

SEQ ID NO: 305207 - DNA, 21 bp, Artificial sequence
  SiRNA target sequence
ctaattggtgtcgaggaggac

SEQ ID NO: 305208 - DNA, 21 bp, Artificial sequence
  SiRNA target sequence
taattggtgtcgaggaggact

SEQ ID NO: 305209 - DNA, 21 bp, Artificial sequence
  SiRNA target sequence
aattggtgtcgaggaggactc

SEQ ID NO: 305210 - DNA, 21 bp, Artificial sequence
  SiRNA target sequence
attggtgtcgaggaggactcg

SEQ ID NO: 305211 - DNA, 21 bp, Artificial sequence
  SiRNA target sequence
ttggtgtcgaggaggactcga

SEQ ID NO: 305212 - DNA, 21 bp, Artificial sequence
  SiRNA target sequence
tggtgtcgaggaggactcgat

SEQ ID NO: 305213 - DNA, 21 bp, Artificial sequence
  SiRNA target sequence
ggtgtcgaggaggactcgata

SEQ ID NO: 305214 - DNA, 21 bp, Artificial sequence
  SiRNA target sequence
gtgtcgaggaggactcgatat

SEQ ID NO: 305215 - DNA, 21 bp, Artificial sequence
  SiRNA target sequence
tgtcgaggaggactcgatatt

SEQ ID NO: 305216 - DNA, 21 bp, Artificial sequence
  SiRNA target sequence
gtcgaggaggactcgatattc

SEQ ID NO: 305217 - DNA, 21 bp, Artificial sequence
  SiRNA target sequence
tcgaggaggactcgatattca

SEQ ID NO: 305218 - DNA, 21 bp, Artificial sequence
  SiRNA target sequence
cgaggaggactcgatattcaa

SEQ ID NO: 305219 - DNA, 21 bp, Artificial sequence
  SiRNA target sequence
gaggaggactcgatattcaag

SEQ ID NO: 305220 - DNA, 21 bp, Artificial sequence
  SiRNA target sequence
aggaggactcgatattcaaga

SEQ ID NO: 305221 - DNA, 21 bp, Artificial sequence
  SiRNA target sequence
ggaggactcgatattcaagaa

SEQ ID NO: 305222 - DNA, 21 bp, Artificial sequence
  SiRNA target sequence
gaggactcgatattcaagaag

SEQ ID NO: 305223 - DNA, 21 bp, Artificial sequence
  SiRNA target sequence
aggactcgatattcaagaagg

SEQ ID NO: 305224 - DNA, 21 bp, Artificial sequence
  SiRNA target sequence
ggactcgatattcaagaaggt

SEQ ID NO: 305225 - DNA, 21 bp, Artificial sequence
  SiRNA target sequence
gactcgatattcaagaaggta

SEQ ID NO: 305226 - DNA, 21 bp, Artificial sequence
  SiRNA target sequence
actcgatattcaagaaggtac

SEQ ID NO: 305227 - DNA, 21 bp, Artificial sequence
  SiRNA target sequence
ctcgatattcaagaaggtaca

SEQ ID NO: 305228 - DNA, 21 bp, Artificial sequence
  SiRNA target sequence
tcgatattcaagaaggtacaa

SEQ ID NO: 305229 - DNA, 21 bp, Artificial sequence
  SiRNA target sequence
cgatattcaagaaggtacaaa

SEQ ID NO: 305230 - DNA, 21 bp, Artificial sequence
  SiRNA target sequence
gatattcaagaaggtacaaaa

SEQ ID NO: 305231 - DNA, 21 bp, Artificial sequence
  SiRNA target sequence
atattcaagaaggtacaaaat

SEQ ID NO: 305232 - DNA, 21 bp, Artificial sequence
  SiRNA target sequence
tattcaagaaggtacaaaatt

SEQ ID NO: 305233 - DNA, 21 bp, Artificial sequence
  SiRNA target sequence
attcaagaaggtacaaaattg

SEQ ID NO: 305234 - DNA, 21 bp, Artificial sequence
  SiRNA target sequence
ttcaagaaggtacaaaattga

SEQ ID NO: 305235 - DNA, 21 bp, Artificial sequence
  SiRNA target sequence
tcaagaaggtacaaaattgaa

SEQ ID NO: 305236 - DNA, 21 bp, Artificial sequence
  SiRNA target sequence
caagaaggtacaaaattgaac

SEQ ID NO: 305237 - DNA, 21 bp, Artificial sequence
  SiRNA target sequence
aagaaggtacaaaattgaact

SEQ ID NO: 305238 - DNA, 21 bp, Artificial sequence
  SiRNA target sequence
agaaggtacaaaattgaactg

SEQ ID NO: 305239 - DNA, 21 bp, Artificial sequence
  SiRNA target sequence
gaaggtacaaaattgaactgt

SEQ ID NO: 305240 - DNA, 21 bp, Artificial sequence
  SiRNA target sequence
aaggtacaaaattgaactgtg

SEQ ID NO: 305241 - DNA, 21 bp, Artificial sequence
  SiRNA target sequence
aggtacaaaattgaactgtga

SEQ ID NO: 305242 - DNA, 21 bp, Artificial sequence
  SiRNA target sequence
ggtacaaaattgaactgtgaa

SEQ ID NO: 305243 - DNA, 21 bp, Artificial sequence
  SiRNA target sequence
gtacaaaattgaactgtgaaa

SEQ ID NO: 305244 - DNA, 21 bp, Artificial sequence
  SiRNA target sequence
tacaaaattgaactgtgaaaa

SEQ ID NO: 305245 - DNA, 21 bp, Artificial sequence
  SiRNA target sequence
acaaaattgaactgtgaaaat

SEQ ID NO: 305246 - DNA, 21 bp, Artificial sequence
  SiRNA target sequence
caaaattgaactgtgaaaatg

SEQ ID NO: 305247 - DNA, 21 bp, Artificial sequence
  SiRNA target sequence
aaaattgaactgtgaaaatgc

SEQ ID NO: 305248 - DNA, 21 bp, Artificial sequence
  SiRNA target sequence
aaattgaactgtgaaaatgca

SEQ ID NO: 305249 - DNA, 21 bp, Artificial sequence
  SiRNA target sequence
aattgaactgtgaaaatgcaa

SEQ ID NO: 305250 - DNA, 21 bp, Artificial sequence
  SiRNA target sequence
attgaactgtgaaaatgcaat

SEQ ID NO: 305251 - DNA, 21 bp, Artificial sequence
  SiRNA target sequence
ttgaactgtgaaaatgcaata

SEQ ID NO: 305252 - DNA, 21 bp, Artificial sequence
  SiRNA target sequence
tgaactgtgaaaatgcaataa

SEQ ID NO: 305253 - DNA, 21 bp, Artificial sequence
  SiRNA target sequence
gaactgtgaaaatgcaataat

SEQ ID NO: 305254 - DNA, 21 bp, Artificial sequence
  SiRNA target sequence
aactgtgaaaatgcaataatg

SEQ ID NO: 305255 - DNA, 21 bp, Artificial sequence
  SiRNA target sequence
actgtgaaaatgcaataatgg

SEQ ID NO: 305256 - DNA, 21 bp, Artificial sequence
  SiRNA target sequence
ctgtgaaaatgcaataatgga

SEQ ID NO: 305257 - DNA, 21 bp, Artificial sequence
  SiRNA target sequence
tgtgaaaatgcaataatggaa

SEQ ID NO: 305258 - DNA, 21 bp, Artificial sequence
  SiRNA target sequence
gtgaaaatgcaataatggaac

SEQ ID NO: 305259 - DNA, 21 bp, Artificial sequence
  SiRNA target sequence
tgaaaatgcaataatggaact

SEQ ID NO: 305260 - DNA, 21 bp, Artificial sequence
  SiRNA target sequence
gaaaatgcaataatggaactt

SEQ ID NO: 305261 - DNA, 21 bp, Artificial sequence
  SiRNA target sequence
aaaatgcaataatggaacttt

SEQ ID NO: 305262 - DNA, 21 bp, Artificial sequence
  SiRNA target sequence
aaatgcaataatggaactttc

SEQ ID NO: 305263 - DNA, 21 bp, Artificial sequence
  SiRNA target sequence
aatgcaataatggaactttct

SEQ ID NO: 305264 - DNA, 21 bp, Artificial sequence
  SiRNA target sequence
atgcaataatggaactttcta

SEQ ID NO: 305265 - DNA, 21 bp, Artificial sequence
  SiRNA target sequence
tgcaataatggaactttctat

SEQ ID NO: 305266 - DNA, 21 bp, Artificial sequence
  SiRNA target sequence
gcaataatggaactttctatg

SEQ ID NO: 305267 - DNA, 21 bp, Artificial sequence
  SiRNA target sequence
caataatggaactttctatgc

SEQ ID NO: 305268 - DNA, 21 bp, Artificial sequence
  SiRNA target sequence
aataatggaactttctatgca

SEQ ID NO: 305269 - DNA, 21 bp, Artificial sequence
  SiRNA target sequence
ataatggaactttctatgcat

SEQ ID NO: 305270 - DNA, 21 bp, Artificial sequence
  SiRNA target sequence
taatggaactttctatgcatg

SEQ ID NO: 305271 - DNA, 21 bp, Artificial sequence
  SiRNA target sequence
aatggaactttctatgcatga

SEQ ID NO: 305272 - DNA, 21 bp, Artificial sequence
  SiRNA target sequence
atggaactttctatgcatgaa

SEQ ID NO: 305273 - DNA, 21 bp, Artificial sequence
  SiRNA target sequence
tggaactttctatgcatgaag

SEQ ID NO: 305274 - DNA, 21 bp, Artificial sequence
  SiRNA target sequence
ggaactttctatgcatgaaga

SEQ ID NO: 305275 - DNA, 21 bp, Artificial sequence
  SiRNA target sequence
gaactttctatgcatgaagag

SEQ ID NO: 305276 - DNA, 21 bp, Artificial sequence
  SiRNA target sequence
aactttctatgcatgaagagg

SEQ ID NO: 305277 - DNA, 21 bp, Artificial sequence
  SiRNA target sequence
actttctatgcatgaagagga

SEQ ID NO: 305278 - DNA, 21 bp, Artificial sequence
  SiRNA target sequence
ctttctatgcatgaagaggaa

SEQ ID NO: 305279 - DNA, 21 bp, Artificial sequence
  SiRNA target sequence
tttctatgcatgaagaggaag

SEQ ID NO: 305280 - DNA, 21 bp, Artificial sequence
  SiRNA target sequence
ttctatgcatgaagaggaagt

SEQ ID NO: 305281 - DNA, 21 bp, Artificial sequence
  SiRNA target sequence
tctatgcatgaagaggaagtc

SEQ ID NO: 305282 - DNA, 21 bp, Artificial sequence
  SiRNA target sequence
ctatgcatgaagaggaagtct

SEQ ID NO: 305283 - DNA, 21 bp, Artificial sequence
  SiRNA target sequence
tatgcatgaagaggaagtctt

SEQ ID NO: 305284 - DNA, 21 bp, Artificial sequence
  SiRNA target sequence
atgcatgaagaggaagtcttt

SEQ ID NO: 305285 - DNA, 21 bp, Artificial sequence
  SiRNA target sequence
tgcatgaagaggaagtctttg

SEQ ID NO: 305286 - DNA, 21 bp, Artificial sequence
  SiRNA target sequence
gcatgaagaggaagtctttga

SEQ ID NO: 305287 - DNA, 21 bp, Artificial sequence
  SiRNA target sequence
catgaagaggaagtctttgat

SEQ ID NO: 305288 - DNA, 21 bp, Artificial sequence
  SiRNA target sequence
atgaagaggaagtctttgata

SEQ ID NO: 305289 - DNA, 21 bp, Artificial sequence
  SiRNA target sequence
tgaagaggaagtctttgataa

SEQ ID NO: 305290 - DNA, 21 bp, Artificial sequence
  SiRNA target sequence
gaagaggaagtctttgataag

SEQ ID NO: 305291 - DNA, 21 bp, Artificial sequence
  SiRNA target sequence
aagaggaagtctttgataagt

SEQ ID NO: 305292 - DNA, 21 bp, Artificial sequence
  SiRNA target sequence
agaggaagtctttgataagtg

SEQ ID NO: 305293 - DNA, 21 bp, Artificial sequence
  SiRNA target sequence
gaggaagtctttgataagtgg

SEQ ID NO: 305294 - DNA, 21 bp, Artificial sequence
  SiRNA target sequence
aggaagtctttgataagtggt

SEQ ID NO: 305295 - DNA, 21 bp, Artificial sequence
  SiRNA target sequence
ggaagtctttgataagtggtc

SEQ ID NO: 305296 - DNA, 21 bp, Artificial sequence
  SiRNA target sequence
gaagtctttgataagtggtca

SEQ ID NO: 305297 - DNA, 21 bp, Artificial sequence
  SiRNA target sequence
aagtctttgataagtggtcaa

SEQ ID NO: 305298 - DNA, 21 bp, Artificial sequence
  SiRNA target sequence
agtctttgataagtggtcaaa

SEQ ID NO: 305299 - DNA, 21 bp, Artificial sequence
  SiRNA target sequence
gtctttgataagtggtcaaaa

SEQ ID NO: 305300 - DNA, 21 bp, Artificial sequence
  SiRNA target sequence
tctttgataagtggtcaaaag

SEQ ID NO: 305301 - DNA, 21 bp, Artificial sequence
  SiRNA target sequence
ctttgataagtggtcaaaagt

SEQ ID NO: 305302 - DNA, 21 bp, Artificial sequence
  SiRNA target sequence
tttgataagtggtcaaaagta

SEQ ID NO: 305303 - DNA, 21 bp, Artificial sequence
  SiRNA target sequence
ttgataagtggtcaaaagtaa

SEQ ID NO: 305304 - DNA, 21 bp, Artificial sequence
  SiRNA target sequence
tgataagtggtcaaaagtaat

SEQ ID NO: 305305 - DNA, 21 bp, Artificial sequence
  SiRNA target sequence
gataagtggtcaaaagtaatt

SEQ ID NO: 305306 - DNA, 21 bp, Artificial sequence
  SiRNA target sequence
ataagtggtcaaaagtaattg

SEQ ID NO: 305307 - DNA, 21 bp, Artificial sequence
  SiRNA target sequence
taagtggtcaaaagtaattga

SEQ ID NO: 305308 - DNA, 21 bp, Artificial sequence
  SiRNA target sequence
aagtggtcaaaagtaattgac

SEQ ID NO: 305309 - DNA, 21 bp, Artificial sequence
  SiRNA target sequence
agtggtcaaaagtaattgaca

SEQ ID NO: 305310 - DNA, 21 bp, Artificial sequence
  SiRNA target sequence
gtggtcaaaagtaattgacaa

SEQ ID NO: 305311 - DNA, 21 bp, Artificial sequence
  SiRNA target sequence
tggtcaaaagtaattgacaaa

SEQ ID NO: 305312 - DNA, 21 bp, Artificial sequence
  SiRNA target sequence
ggtcaaaagtaattgacaaag

SEQ ID NO: 305313 - DNA, 21 bp, Artificial sequence
  SiRNA target sequence
gtcaaaagtaattgacaaagc

SEQ ID NO: 305314 - DNA, 21 bp, Artificial sequence
  SiRNA target sequence
tcaaaagtaattgacaaagct

SEQ ID NO: 305315 - DNA, 21 bp, Artificial sequence
  SiRNA target sequence
caaaagtaattgacaaagctt

SEQ ID NO: 305316 - DNA, 21 bp, Artificial sequence
  SiRNA target sequence
aaaagtaattgacaaagctta

SEQ ID NO: 305317 - DNA, 21 bp, Artificial sequence
  SiRNA target sequence
aaagtaattgacaaagcttat

SEQ ID NO: 305318 - DNA, 21 bp, Artificial sequence
  SiRNA target sequence
aagtaattgacaaagcttatg

SEQ ID NO: 305319 - DNA, 21 bp, Artificial sequence
  SiRNA target sequence
agtaattgacaaagcttatgc

SEQ ID NO: 305320 - DNA, 21 bp, Artificial sequence
  SiRNA target sequence
gtaattgacaaagcttatgca

SEQ ID NO: 305321 - DNA, 21 bp, Artificial sequence
  SiRNA target sequence
taattgacaaagcttatgcaa

SEQ ID NO: 305322 - DNA, 21 bp, Artificial sequence
  SiRNA target sequence
aattgacaaagcttatgcaaa

SEQ ID NO: 305323 - DNA, 21 bp, Artificial sequence
  SiRNA target sequence
attgacaaagcttatgcaaag

SEQ ID NO: 305324 - DNA, 21 bp, Artificial sequence
  SiRNA target sequence
ttgacaaagcttatgcaaagg

SEQ ID NO: 305325 - DNA, 21 bp, Artificial sequence
  SiRNA target sequence
tgacaaagcttatgcaaaggc

SEQ ID NO: 305326 - DNA, 21 bp, Artificial sequence
  SiRNA target sequence
gacaaagcttatgcaaaggct

SEQ ID NO: 305327 - DNA, 21 bp, Artificial sequence
  SiRNA target sequence
acaaagcttatgcaaaggcta

SEQ ID NO: 305328 - DNA, 21 bp, Artificial sequence
  SiRNA target sequence
caaagcttatgcaaaggctac

SEQ ID NO: 305329 - DNA, 21 bp, Artificial sequence
  SiRNA target sequence
aaagcttatgcaaaggctaca

SEQ ID NO: 305330 - DNA, 21 bp, Artificial sequence
  SiRNA target sequence
aagcttatgcaaaggctacag

SEQ ID NO: 305331 - DNA, 21 bp, Artificial sequence
  SiRNA target sequence
agcttatgcaaaggctacagg

SEQ ID NO: 305332 - DNA, 21 bp, Artificial sequence
  SiRNA target sequence
gcttatgcaaaggctacagga

SEQ ID NO: 305333 - DNA, 21 bp, Artificial sequence
  SiRNA target sequence
cttatgcaaaggctacaggag

SEQ ID NO: 305334 - DNA, 21 bp, Artificial sequence
  SiRNA target sequence
ttatgcaaaggctacaggaga

SEQ ID NO: 305335 - DNA, 21 bp, Artificial sequence
  SiRNA target sequence
tatgcaaaggctacaggagat

SEQ ID NO: 305336 - DNA, 21 bp, Artificial sequence
  SiRNA target sequence
atgcaaaggctacaggagatc

SEQ ID NO: 305337 - DNA, 21 bp, Artificial sequence
  SiRNA target sequence
tgcaaaggctacaggagatca

SEQ ID NO: 305338 - DNA, 21 bp, Artificial sequence
  SiRNA target sequence
gcaaaggctacaggagatcac

SEQ ID NO: 305339 - DNA, 21 bp, Artificial sequence
  SiRNA target sequence
caaaggctacaggagatcacc

SEQ ID NO: 305340 - DNA, 21 bp, Artificial sequence
  SiRNA target sequence
aaaggctacaggagatcacct

SEQ ID NO: 305341 - DNA, 21 bp, Artificial sequence
  SiRNA target sequence
aaggctacaggagatcacctg

SEQ ID NO: 305342 - DNA, 21 bp, Artificial sequence
  SiRNA target sequence
aggctacaggagatcacctgg

SEQ ID NO: 305343 - DNA, 21 bp, Artificial sequence
  SiRNA target sequence
ggctacaggagatcacctgga

SEQ ID NO: 305344 - DNA, 21 bp, Artificial sequence
  SiRNA target sequence
gctacaggagatcacctggac

SEQ ID NO: 305345 - DNA, 21 bp, Artificial sequence
  SiRNA target sequence
ctacaggagatcacctggaca

SEQ ID NO: 305346 - DNA, 21 bp, Artificial sequence
  SiRNA target sequence
tacaggagatcacctggacat

SEQ ID NO: 305347 - DNA, 21 bp, Artificial sequence
  SiRNA target sequence
acaggagatcacctggacata

SEQ ID NO: 305348 - DNA, 21 bp, Artificial sequence
  SiRNA target sequence
caggagatcacctggacataa

SEQ ID NO: 305349 - DNA, 21 bp, Artificial sequence
  SiRNA target sequence
aggagatcacctggacataaa

SEQ ID NO: 305350 - DNA, 21 bp, Artificial sequence
  SiRNA target sequence
ggagatcacctggacataaac

SEQ ID NO: 305351 - DNA, 21 bp, Artificial sequence
  SiRNA target sequence
gagatcacctggacataaaca

SEQ ID NO: 305352 - DNA, 21 bp, Artificial sequence
  SiRNA target sequence
agatcacctggacataaacac

SEQ ID NO: 305353 - DNA, 21 bp, Artificial sequence
  SiRNA target sequence
gatcacctggacataaacact

SEQ ID NO: 305354 - DNA, 21 bp, Artificial sequence
  SiRNA target sequence
atcacctggacataaacactt

SEQ ID NO: 305355 - DNA, 21 bp, Artificial sequence
  SiRNA target sequence
tcacctggacataaacactta

SEQ ID NO: 305356 - DNA, 21 bp, Artificial sequence
  SiRNA target sequence
cacctggacataaacacttat

SEQ ID NO: 305357 - DNA, 21 bp, Artificial sequence
  SiRNA target sequence
acctggacataaacacttatc

SEQ ID NO: 305358 - DNA, 21 bp, Artificial sequence
  SiRNA target sequence
cctggacataaacacttatcg

SEQ ID NO: 305359 - DNA, 21 bp, Artificial sequence
  SiRNA target sequence
ctggacataaacacttatcgt

SEQ ID NO: 305360 - DNA, 21 bp, Artificial sequence
  SiRNA target sequence
tggacataaacacttatcgtg

SEQ ID NO: 305361 - DNA, 21 bp, Artificial sequence
  SiRNA target sequence
ggacataaacacttatcgtgg

SEQ ID NO: 305362 - DNA, 21 bp, Artificial sequence
  SiRNA target sequence
gacataaacacttatcgtgga

SEQ ID NO: 305363 - DNA, 21 bp, Artificial sequence
  SiRNA target sequence
acataaacacttatcgtggat

SEQ ID NO: 305364 - DNA, 21 bp, Artificial sequence
  SiRNA target sequence
cataaacacttatcgtggata

SEQ ID NO: 305365 - DNA, 21 bp, Artificial sequence
  SiRNA target sequence
ataaacacttatcgtggatat

SEQ ID NO: 305366 - DNA, 21 bp, Artificial sequence
  SiRNA target sequence
taaacacttatcgtggatatg

SEQ ID NO: 305367 - DNA, 21 bp, Artificial sequence
  SiRNA target sequence
aaacacttatcgtggatatgc

SEQ ID NO: 305368 - DNA, 21 bp, Artificial sequence
  SiRNA target sequence
aacacttatcgtggatatgct

SEQ ID NO: 305369 - DNA, 21 bp, Artificial sequence
  SiRNA target sequence
acacttatcgtggatatgctc

SEQ ID NO: 305370 - DNA, 21 bp, Artificial sequence
  SiRNA target sequence
cacttatcgtggatatgctca

SEQ ID NO: 305371 - DNA, 21 bp, Artificial sequence
  SiRNA target sequence
acttatcgtggatatgctcag

SEQ ID NO: 305372 - DNA, 21 bp, Artificial sequence
  SiRNA target sequence
cttatcgtggatatgctcagg

SEQ ID NO: 305373 - DNA, 21 bp, Artificial sequence
  SiRNA target sequence
ttatcgtggatatgctcagga

SEQ ID NO: 305374 - DNA, 21 bp, Artificial sequence
  SiRNA target sequence
tatcgtggatatgctcaggag

SEQ ID NO: 305375 - DNA, 21 bp, Artificial sequence
  SiRNA target sequence
atcgtggatatgctcaggagc

SEQ ID NO: 305376 - DNA, 21 bp, Artificial sequence
  SiRNA target sequence
tcgtggatatgctcaggagcg

SEQ ID NO: 305377 - DNA, 21 bp, Artificial sequence
  SiRNA target sequence
cgtggatatgctcaggagcgg

SEQ ID NO: 305378 - DNA, 21 bp, Artificial sequence
  SiRNA target sequence
gtggatatgctcaggagcggt

SEQ ID NO: 305379 - DNA, 21 bp, Artificial sequence
  SiRNA target sequence
tggatatgctcaggagcggta

SEQ ID NO: 305380 - DNA, 21 bp, Artificial sequence
  SiRNA target sequence
ggatatgctcaggagcggtat

SEQ ID NO: 305381 - DNA, 21 bp, Artificial sequence
  SiRNA target sequence
gatatgctcaggagcggtatc

SEQ ID NO: 305382 - DNA, 21 bp, Artificial sequence
  SiRNA target sequence
atatgctcaggagcggtatct

SEQ ID NO: 305383 - DNA, 21 bp, Artificial sequence
  SiRNA target sequence
tatgctcaggagcggtatctc

SEQ ID NO: 305384 - DNA, 21 bp, Artificial sequence
  SiRNA target sequence
atgctcaggagcggtatctcg

SEQ ID NO: 305385 - DNA, 21 bp, Artificial sequence
  SiRNA target sequence
tgctcaggagcggtatctcga

SEQ ID NO: 305386 - DNA, 21 bp, Artificial sequence
  SiRNA target sequence
gctcaggagcggtatctcgag

SEQ ID NO: 305387 - DNA, 21 bp, Artificial sequence
  SiRNA target sequence
ctcaggagcggtatctcgagt

SEQ ID NO: 305388 - DNA, 21 bp, Artificial sequence
  SiRNA target sequence
tcaggagcggtatctcgagta

SEQ ID NO: 305389 - DNA, 21 bp, Artificial sequence
  SiRNA target sequence
caggagcggtatctcgagtat

SEQ ID NO: 305390 - DNA, 21 bp, Artificial sequence
  SiRNA target sequence
aggagcggtatctcgagtatt

SEQ ID NO: 305391 - DNA, 21 bp, Artificial sequence
  SiRNA target sequence
ggagcggtatctcgagtatta

SEQ ID NO: 305392 - DNA, 21 bp, Artificial sequence
  SiRNA target sequence
gagcggtatctcgagtattat

SEQ ID NO: 305393 - DNA, 21 bp, Artificial sequence
  SiRNA target sequence
agcggtatctcgagtattata

SEQ ID NO: 305394 - DNA, 21 bp, Artificial sequence
  SiRNA target sequence
gcggtatctcgagtattatat

SEQ ID NO: 305395 - DNA, 21 bp, Artificial sequence
  SiRNA target sequence
cggtatctcgagtattatatg

SEQ ID NO: 305396 - DNA, 21 bp, Artificial sequence
  SiRNA target sequence
ggtatctcgagtattatatgt

SEQ ID NO: 305397 - DNA, 21 bp, Artificial sequence
  SiRNA target sequence
gtatctcgagtattatatgta

SEQ ID NO: 305398 - DNA, 21 bp, Artificial sequence
  SiRNA target sequence
tatctcgagtattatatgtaa

SEQ ID NO: 305399 - DNA, 21 bp, Artificial sequence
  SiRNA target sequence
atctcgagtattatatgtaaa

SEQ ID NO: 305400 - DNA, 21 bp, Artificial sequence
  SiRNA target sequence
tctcgagtattatatgtaaat

SEQ ID NO: 305401 - DNA, 21 bp, Artificial sequence
  SiRNA target sequence
ctcgagtattatatgtaaata

SEQ ID NO: 305402 - DNA, 21 bp, Artificial sequence
  SiRNA target sequence
tcgagtattatatgtaaatat

SEQ ID NO: 305403 - DNA, 21 bp, Artificial sequence
  SiRNA target sequence
cgagtattatatgtaaatata

SEQ ID NO: 305404 - DNA, 21 bp, Artificial sequence
  SiRNA target sequence
gagtattatatgtaaatataa

SEQ ID NO: 305405 - DNA, 21 bp, Artificial sequence
  SiRNA target sequence
agtattatatgtaaatataat

SEQ ID NO: 305406 - DNA, 21 bp, Artificial sequence
  SiRNA target sequence
gtattatatgtaaatataata

SEQ ID NO: 305407 - DNA, 21 bp, Artificial sequence
  SiRNA target sequence
tattatatgtaaatataatac

SEQ ID NO: 305408 - DNA, 21 bp, Artificial sequence
  SiRNA target sequence
attatatgtaaatataatact

SEQ ID NO: 305409 - DNA, 21 bp, Artificial sequence
  SiRNA target sequence
ttatatgtaaatataatactt

SEQ ID NO: 305410 - DNA, 21 bp, Artificial sequence
  SiRNA target sequence
tatatgtaaatataatacttg

SEQ ID NO: 305411 - DNA, 21 bp, Artificial sequence
  SiRNA target sequence
atatgtaaatataatacttga

SEQ ID NO: 305412 - DNA, 21 bp, Artificial sequence
  SiRNA target sequence
tatgtaaatataatacttgag

SEQ ID NO: 305413 - DNA, 21 bp, Artificial sequence
  SiRNA target sequence
atgtaaatataatacttgaga

SEQ ID NO: 305414 - DNA, 21 bp, Artificial sequence
  SiRNA target sequence
tgtaaatataatacttgagat

SEQ ID NO: 305415 - DNA, 21 bp, Artificial sequence
  SiRNA target sequence
gtaaatataatacttgagatg

SEQ ID NO: 305416 - DNA, 21 bp, Artificial sequence
  SiRNA target sequence
taaatataatacttgagatgc

SEQ ID NO: 305417 - DNA, 21 bp, Artificial sequence
  SiRNA target sequence
aaatataatacttgagatgca

SEQ ID NO: 305418 - DNA, 21 bp, Artificial sequence
  SiRNA target sequence
aatataatacttgagatgcac

SEQ ID NO: 305419 - DNA, 21 bp, Artificial sequence
  SiRNA target sequence
atataatacttgagatgcact

SEQ ID NO: 305420 - DNA, 21 bp, Artificial sequence
  SiRNA target sequence
tataatacttgagatgcactg

SEQ ID NO: 305421 - DNA, 21 bp, Artificial sequence
  SiRNA target sequence
ataatacttgagatgcactgt

SEQ ID NO: 305422 - DNA, 21 bp, Artificial sequence
  SiRNA target sequence
taatacttgagatgcactgtt

SEQ ID NO: 305423 - DNA, 21 bp, Artificial sequence
  SiRNA target sequence
aatacttgagatgcactgttt

SEQ ID NO: 305424 - DNA, 21 bp, Artificial sequence
  SiRNA target sequence
atacttgagatgcactgtttc

SEQ ID NO: 305425 - DNA, 21 bp, Artificial sequence
  SiRNA target sequence
tacttgagatgcactgtttca

SEQ ID NO: 305426 - DNA, 21 bp, Artificial sequence
  SiRNA target sequence
acttgagatgcactgtttcat

SEQ ID NO: 305427 - DNA, 21 bp, Artificial sequence
  SiRNA target sequence
cttgagatgcactgtttcatg

SEQ ID NO: 305428 - DNA, 21 bp, Artificial sequence
  SiRNA target sequence
ttgagatgcactgtttcatgg

SEQ ID NO: 305429 - DNA, 21 bp, Artificial sequence
  SiRNA target sequence
tgagatgcactgtttcatggt

SEQ ID NO: 305430 - DNA, 21 bp, Artificial sequence
  SiRNA target sequence
gagatgcactgtttcatggtt

SEQ ID NO: 305431 - DNA, 21 bp, Artificial sequence
  SiRNA target sequence
agatgcactgtttcatggtta

SEQ ID NO: 305432 - DNA, 21 bp, Artificial sequence
  SiRNA target sequence
gatgcactgtttcatggttac

SEQ ID NO: 305433 - DNA, 21 bp, Artificial sequence
  SiRNA target sequence
atgcactgtttcatggttacc

SEQ ID NO: 305434 - DNA, 21 bp, Artificial sequence
  SiRNA target sequence
tgcactgtttcatggttaccc

SEQ ID NO: 305435 - DNA, 21 bp, Artificial sequence
  SiRNA target sequence
gcactgtttcatggttaccca

SEQ ID NO: 305436 - DNA, 21 bp, Artificial sequence
  SiRNA target sequence
cactgtttcatggttacccat

SEQ ID NO: 305437 - DNA, 21 bp, Artificial sequence
  SiRNA target sequence
actgtttcatggttacccatc

SEQ ID NO: 305438 - DNA, 21 bp, Artificial sequence
  SiRNA target sequence
ctgtttcatggttacccatca

SEQ ID NO: 305439 - DNA, 21 bp, Artificial sequence
  SiRNA target sequence
tgtttcatggttacccatcat

SEQ ID NO: 305440 - DNA, 21 bp, Artificial sequence
  SiRNA target sequence
gtttcatggttacccatcatt

SEQ ID NO: 305441 - DNA, 21 bp, Artificial sequence
  SiRNA target sequence
tttcatggttacccatcattt

SEQ ID NO: 305442 - DNA, 21 bp, Artificial sequence
  SiRNA target sequence
ttcatggttacccatcatttg

SEQ ID NO: 305443 - DNA, 21 bp, Artificial sequence
  SiRNA target sequence
tcatggttacccatcatttga

SEQ ID NO: 305444 - DNA, 21 bp, Artificial sequence
  SiRNA target sequence
catggttacccatcatttgag

SEQ ID NO: 305445 - DNA, 21 bp, Artificial sequence
  SiRNA target sequence
atggttacccatcatttgagg

SEQ ID NO: 305446 - DNA, 21 bp, Artificial sequence
  SiRNA target sequence
tggttacccatcatttgagga

SEQ ID NO: 305447 - DNA, 21 bp, Artificial sequence
  SiRNA target sequence
ggttacccatcatttgaggaa

SEQ ID NO: 305448 - DNA, 21 bp, Artificial sequence
  SiRNA target sequence
gttacccatcatttgaggaaa

SEQ ID NO: 305449 - DNA, 21 bp, Artificial sequence
  SiRNA target sequence
ttacccatcatttgaggaaat

SEQ ID NO: 305450 - DNA, 21 bp, Artificial sequence
  SiRNA target sequence
tacccatcatttgaggaaatt

SEQ ID NO: 305451 - DNA, 21 bp, Artificial sequence
  SiRNA target sequence
acccatcatttgaggaaattt

SEQ ID NO: 305452 - DNA, 21 bp, Artificial sequence
  SiRNA target sequence
cccatcatttgaggaaatttc

SEQ ID NO: 305453 - DNA, 21 bp, Artificial sequence
  SiRNA target sequence
ccatcatttgaggaaatttcc

SEQ ID NO: 305454 - DNA, 21 bp, Artificial sequence
  SiRNA target sequence
catcatttgaggaaatttcca

SEQ ID NO: 305455 - DNA, 21 bp, Artificial sequence
  SiRNA target sequence
atcatttgaggaaatttccaa

SEQ ID NO: 305456 - DNA, 21 bp, Artificial sequence
  SiRNA target sequence
tcatttgaggaaatttccaat

SEQ ID NO: 305457 - DNA, 21 bp, Artificial sequence
  SiRNA target sequence
catttgaggaaatttccaata

SEQ ID NO: 305458 - DNA, 21 bp, Artificial sequence
  SiRNA target sequence
atttgaggaaatttccaataa

SEQ ID NO: 305459 - DNA, 21 bp, Artificial sequence
  SiRNA target sequence
tttgaggaaatttccaataaa

SEQ ID NO: 305460 - DNA, 21 bp, Artificial sequence
  SiRNA target sequence
ttgaggaaatttccaataaac

SEQ ID NO: 305461 - DNA, 21 bp, Artificial sequence
  SiRNA target sequence
tgaggaaatttccaataaact

SEQ ID NO: 305462 - DNA, 21 bp, Artificial sequence
  SiRNA target sequence
gaggaaatttccaataaactt

SEQ ID NO: 305463 - DNA, 21 bp, Artificial sequence
  SiRNA target sequence
aggaaatttccaataaacttg

SEQ ID NO: 305464 - DNA, 21 bp, Artificial sequence
  SiRNA target sequence
ggaaatttccaataaacttga

SEQ ID NO: 305465 - DNA, 21 bp, Artificial sequence
  SiRNA target sequence
gaaatttccaataaacttgaa

SEQ ID NO: 305466 - DNA, 21 bp, Artificial sequence
  SiRNA target sequence
aaatttccaataaacttgaat

SEQ ID NO: 305467 - DNA, 21 bp, Artificial sequence
  SiRNA target sequence
aatttccaataaacttgaatg

SEQ ID NO: 305468 - DNA, 21 bp, Artificial sequence
  SiRNA target sequence
atttccaataaacttgaatgt

SEQ ID NO: 305469 - DNA, 21 bp, Artificial sequence
  SiRNA target sequence
tttccaataaacttgaatgta

SEQ ID NO: 305470 - DNA, 21 bp, Artificial sequence
  SiRNA target sequence
ttccaataaacttgaatgtaa

SEQ ID NO: 305471 - DNA, 21 bp, Artificial sequence
  SiRNA target sequence
tccaataaacttgaatgtaag

SEQ ID NO: 305472 - DNA, 21 bp, Artificial sequence
  SiRNA target sequence
ccaataaacttgaatgtaagg

SEQ ID NO: 305473 - DNA, 21 bp, Artificial sequence
  SiRNA target sequence
caataaacttgaatgtaaggc

SEQ ID NO: 305474 - DNA, 21 bp, Artificial sequence
  SiRNA target sequence
aataaacttgaatgtaaggct

SEQ ID NO: 305475 - DNA, 21 bp, Artificial sequence
  SiRNA target sequence
ataaacttgaatgtaaggctt

SEQ ID NO: 305476 - DNA, 21 bp, Artificial sequence
  SiRNA target sequence
taaacttgaatgtaaggcttg

SEQ ID NO: 305477 - DNA, 21 bp, Artificial sequence
  SiRNA target sequence
aaacttgaatgtaaggcttga

SEQ ID NO: 305478 - DNA, 21 bp, Artificial sequence
  SiRNA target sequence
aacttgaatgtaaggcttgaa

SEQ ID NO: 305479 - DNA, 21 bp, Artificial sequence
  SiRNA target sequence
acttgaatgtaaggcttgaaa

SEQ ID NO: 305480 - DNA, 21 bp, Artificial sequence
  SiRNA target sequence
cttgaatgtaaggcttgaaac

SEQ ID NO: 305481 - DNA, 21 bp, Artificial sequence
  SiRNA target sequence
ttgaatgtaaggcttgaaaca

SEQ ID NO: 305482 - DNA, 21 bp, Artificial sequence
  SiRNA target sequence
tgaatgtaaggcttgaaacag

SEQ ID NO: 305483 - DNA, 21 bp, Artificial sequence
  SiRNA target sequence
gaatgtaaggcttgaaacagt

SEQ ID NO: 305484 - DNA, 21 bp, Artificial sequence
  SiRNA target sequence
aatgtaaggcttgaaacagtg

SEQ ID NO: 305485 - DNA, 21 bp, Artificial sequence
  SiRNA target sequence
atgtaaggcttgaaacagtgg

SEQ ID NO: 305486 - DNA, 21 bp, Artificial sequence
  SiRNA target sequence
tgtaaggcttgaaacagtggt

SEQ ID NO: 305487 - DNA, 21 bp, Artificial sequence
  SiRNA target sequence
gtaaggcttgaaacagtggtc

SEQ ID NO: 305488 - DNA, 21 bp, Artificial sequence
  SiRNA target sequence
taaggcttgaaacagtggtct

SEQ ID NO: 305489 - DNA, 21 bp, Artificial sequence
  SiRNA target sequence
aaggcttgaaacagtggtcta

SEQ ID NO: 305490 - DNA, 21 bp, Artificial sequence
  SiRNA target sequence
aggcttgaaacagtggtctag

SEQ ID NO: 305491 - DNA, 21 bp, Artificial sequence
  SiRNA target sequence
ggcttgaaacagtggtctagg

SEQ ID NO: 305492 - DNA, 21 bp, Artificial sequence
  SiRNA target sequence
gcttgaaacagtggtctaggt

SEQ ID NO: 305493 - DNA, 21 bp, Artificial sequence
  SiRNA target sequence
cttgaaacagtggtctaggtg

SEQ ID NO: 305494 - DNA, 21 bp, Artificial sequence
  SiRNA target sequence
ttgaaacagtggtctaggtgc

SEQ ID NO: 305495 - DNA, 21 bp, Artificial sequence
  SiRNA target sequence
tgaaacagtggtctaggtgcc

SEQ ID NO: 305496 - DNA, 21 bp, Artificial sequence
  SiRNA target sequence
gaaacagtggtctaggtgccc

SEQ ID NO: 305497 - DNA, 21 bp, Artificial sequence
  SiRNA target sequence
aaacagtggtctaggtgccct

SEQ ID NO: 305498 - DNA, 21 bp, Artificial sequence
  SiRNA target sequence
aacagtggtctaggtgcccta

SEQ ID NO: 305499 - DNA, 21 bp, Artificial sequence
  SiRNA target sequence
acagtggtctaggtgccctat

SEQ ID NO: 305500 - DNA, 21 bp, Artificial sequence
  SiRNA target sequence
cagtggtctaggtgccctatt

SEQ ID NO: 305501 - DNA, 21 bp, Artificial sequence
  SiRNA target sequence
agtggtctaggtgccctattt

SEQ ID NO: 305502 - DNA, 21 bp, Artificial sequence
  SiRNA target sequence
gtggtctaggtgccctattta

SEQ ID NO: 305503 - DNA, 21 bp, Artificial sequence
  SiRNA target sequence
tggtctaggtgccctatttag

SEQ ID NO: 305504 - DNA, 21 bp, Artificial sequence
  SiRNA target sequence
ggtctaggtgccctatttagg

SEQ ID NO: 305505 - DNA, 21 bp, Artificial sequence
  SiRNA target sequence
gtctaggtgccctatttaggg

SEQ ID NO: 305506 - DNA, 21 bp, Artificial sequence
  SiRNA target sequence
tctaggtgccctatttagggt

SEQ ID NO: 305507 - DNA, 21 bp, Artificial sequence
  SiRNA target sequence
ctaggtgccctatttagggtg

SEQ ID NO: 305508 - DNA, 21 bp, Artificial sequence
  SiRNA target sequence
taggtgccctatttagggtga

SEQ ID NO: 305509 - DNA, 21 bp, Artificial sequence
  SiRNA target sequence
aggtgccctatttagggtgag

SEQ ID NO: 305510 - DNA, 21 bp, Artificial sequence
  SiRNA target sequence
ggtgccctatttagggtgagg

SEQ ID NO: 305511 - DNA, 21 bp, Artificial sequence
  SiRNA target sequence
gtgccctatttagggtgagga

SEQ ID NO: 305512 - DNA, 21 bp, Artificial sequence
  SiRNA target sequence
tgccctatttagggtgaggag

SEQ ID NO: 305513 - DNA, 21 bp, Artificial sequence
  SiRNA target sequence
gccctatttagggtgaggagc

SEQ ID NO: 305514 - DNA, 21 bp, Artificial sequence
  SiRNA target sequence
ccctatttagggtgaggagcc

SEQ ID NO: 305515 - DNA, 21 bp, Artificial sequence
  SiRNA target sequence
cctatttagggtgaggagcct

SEQ ID NO: 305516 - DNA, 21 bp, Artificial sequence
  SiRNA target sequence
ctatttagggtgaggagccta

SEQ ID NO: 305517 - DNA, 21 bp, Artificial sequence
  SiRNA target sequence
tatttagggtgaggagcctag

SEQ ID NO: 305518 - DNA, 21 bp, Artificial sequence
  SiRNA target sequence
atttagggtgaggagcctagc

SEQ ID NO: 305519 - DNA, 21 bp, Artificial sequence
  SiRNA target sequence
tttagggtgaggagcctagct

SEQ ID NO: 305520 - DNA, 21 bp, Artificial sequence
  SiRNA target sequence
ttagggtgaggagcctagctg

SEQ ID NO: 305521 - DNA, 21 bp, Artificial sequence
  SiRNA target sequence
tagggtgaggagcctagctgg

SEQ ID NO: 305522 - DNA, 21 bp, Artificial sequence
  SiRNA target sequence
agggtgaggagcctagctggc

SEQ ID NO: 305523 - DNA, 21 bp, Artificial sequence
  SiRNA target sequence
gggtgaggagcctagctggca

SEQ ID NO: 305524 - DNA, 21 bp, Artificial sequence
  SiRNA target sequence
ggtgaggagcctagctggcag

SEQ ID NO: 305525 - DNA, 21 bp, Artificial sequence
  SiRNA target sequence
gtgaggagcctagctggcagc

SEQ ID NO: 305526 - DNA, 21 bp, Artificial sequence
  SiRNA target sequence
tgaggagcctagctggcagcc

SEQ ID NO: 305527 - DNA, 21 bp, Artificial sequence
  SiRNA target sequence
gaggagcctagctggcagccc

SEQ ID NO: 305528 - DNA, 21 bp, Artificial sequence
  SiRNA target sequence
aggagcctagctggcagcccc

SEQ ID NO: 305529 - DNA, 21 bp, Artificial sequence
  SiRNA target sequence
ggagcctagctggcagcccca

SEQ ID NO: 305530 - DNA, 21 bp, Artificial sequence
  SiRNA target sequence
gagcctagctggcagccccag

SEQ ID NO: 305531 - DNA, 21 bp, Artificial sequence
  SiRNA target sequence
agcctagctggcagccccagt

SEQ ID NO: 305532 - DNA, 21 bp, Artificial sequence
  SiRNA target sequence
gcctagctggcagccccagtg

SEQ ID NO: 305533 - DNA, 21 bp, Artificial sequence
  SiRNA target sequence
cctagctggcagccccagtga

SEQ ID NO: 305534 - DNA, 21 bp, Artificial sequence
  SiRNA target sequence
ctagctggcagccccagtgaa

SEQ ID NO: 305535 - DNA, 21 bp, Artificial sequence
  SiRNA target sequence
tagctggcagccccagtgaat

SEQ ID NO: 305536 - DNA, 21 bp, Artificial sequence
  SiRNA target sequence
agctggcagccccagtgaatc

SEQ ID NO: 305537 - DNA, 21 bp, Artificial sequence
  SiRNA target sequence
gctggcagccccagtgaatcc

SEQ ID NO: 305538 - DNA, 21 bp, Artificial sequence
  SiRNA target sequence
ctggcagccccagtgaatcct

SEQ ID NO: 305539 - DNA, 21 bp, Artificial sequence
  SiRNA target sequence
tggcagccccagtgaatcctc

SEQ ID NO: 305540 - DNA, 21 bp, Artificial sequence
  SiRNA target sequence
ggcagccccagtgaatcctct

SEQ ID NO: 305541 - DNA, 21 bp, Artificial sequence
  SiRNA target sequence
gcagccccagtgaatcctcta

SEQ ID NO: 305542 - DNA, 21 bp, Artificial sequence
  SiRNA target sequence
cagccccagtgaatcctctat

SEQ ID NO: 305543 - DNA, 21 bp, Artificial sequence
  SiRNA target sequence
agccccagtgaatcctctatt

SEQ ID NO: 305544 - DNA, 21 bp, Artificial sequence
  SiRNA target sequence
gccccagtgaatcctctattg

SEQ ID NO: 305545 - DNA, 21 bp, Artificial sequence
  SiRNA target sequence
ccccagtgaatcctctattgg

SEQ ID NO: 305546 - DNA, 21 bp, Artificial sequence
  SiRNA target sequence
cccagtgaatcctctattgga

SEQ ID NO: 305547 - DNA, 21 bp, Artificial sequence
  SiRNA target sequence
ccagtgaatcctctattggat

SEQ ID NO: 305548 - DNA, 21 bp, Artificial sequence
  SiRNA target sequence
cagtgaatcctctattggata

SEQ ID NO: 305549 - DNA, 21 bp, Artificial sequence
  SiRNA target sequence
agtgaatcctctattggatag

SEQ ID NO: 305550 - DNA, 21 bp, Artificial sequence
  SiRNA target sequence
gtgaatcctctattggataga

SEQ ID NO: 305551 - DNA, 21 bp, Artificial sequence
  SiRNA target sequence
tgaatcctctattggatagaa

SEQ ID NO: 305552 - DNA, 21 bp, Artificial sequence
  SiRNA target sequence
gaatcctctattggatagaaa

SEQ ID NO: 305553 - DNA, 21 bp, Artificial sequence
  SiRNA target sequence
aatcctctattggatagaaac

SEQ ID NO: 305554 - DNA, 21 bp, Artificial sequence
  SiRNA target sequence
atcctctattggatagaaacc

SEQ ID NO: 305555 - DNA, 21 bp, Artificial sequence
  SiRNA target sequence
tcctctattggatagaaaccg

SEQ ID NO: 305556 - DNA, 21 bp, Artificial sequence
  SiRNA target sequence
cctctattggatagaaaccgc

SEQ ID NO: 305557 - DNA, 21 bp, Artificial sequence
  SiRNA target sequence
ctctattggatagaaaccgct

SEQ ID NO: 305558 - DNA, 21 bp, Artificial sequence
  SiRNA target sequence
tctattggatagaaaccgcta

SEQ ID NO: 305559 - DNA, 21 bp, Artificial sequence
  SiRNA target sequence
ctattggatagaaaccgctat

SEQ ID NO: 305560 - DNA, 21 bp, Artificial sequence
  SiRNA target sequence
tattggatagaaaccgctata

SEQ ID NO: 305561 - DNA, 21 bp, Artificial sequence
  SiRNA target sequence
attggatagaaaccgctatat

SEQ ID NO: 305562 - DNA, 21 bp, Artificial sequence
  SiRNA target sequence
ttggatagaaaccgctatatc

SEQ ID NO: 305563 - DNA, 21 bp, Artificial sequence
  SiRNA target sequence
tggatagaaaccgctatatcg

SEQ ID NO: 305564 - DNA, 21 bp, Artificial sequence
  SiRNA target sequence
ggatagaaaccgctatatcgg

SEQ ID NO: 305565 - DNA, 21 bp, Artificial sequence
  SiRNA target sequence
gatagaaaccgctatatcggg

SEQ ID NO: 305566 - DNA, 21 bp, Artificial sequence
  SiRNA target sequence
atagaaaccgctatatcgggt

SEQ ID NO: 305567 - DNA, 21 bp, Artificial sequence
  SiRNA target sequence
tagaaaccgctatatcgggta

SEQ ID NO: 305568 - DNA, 21 bp, Artificial sequence
  SiRNA target sequence
agaaaccgctatatcgggtag

SEQ ID NO: 305569 - DNA, 21 bp, Artificial sequence
  SiRNA target sequence
gaaaccgctatatcgggtagc

SEQ ID NO: 305570 - DNA, 21 bp, Artificial sequence
  SiRNA target sequence
aaaccgctatatcgggtagct

SEQ ID NO: 305571 - DNA, 21 bp, Artificial sequence
  SiRNA target sequence
aaccgctatatcgggtagcta

SEQ ID NO: 305572 - DNA, 21 bp, Artificial sequence
  SiRNA target sequence
accgctatatcgggtagctat

SEQ ID NO: 305573 - DNA, 21 bp, Artificial sequence
  SiRNA target sequence
ccgctatatcgggtagctata

SEQ ID NO: 305574 - DNA, 21 bp, Artificial sequence
  SiRNA target sequence
cgctatatcgggtagctatag

SEQ ID NO: 305575 - DNA, 21 bp, Artificial sequence
  SiRNA target sequence
gctatatcgggtagctatagc

SEQ ID NO: 305576 - DNA, 21 bp, Artificial sequence
  SiRNA target sequence
ctatatcgggtagctatagca

SEQ ID NO: 305577 - DNA, 21 bp, Artificial sequence
  SiRNA target sequence
tatatcgggtagctatagcag

SEQ ID NO: 305578 - DNA, 21 bp, Artificial sequence
  SiRNA target sequence
atatcgggtagctatagcagt

SEQ ID NO: 305579 - DNA, 21 bp, Artificial sequence
  SiRNA target sequence
tatcgggtagctatagcagtc

SEQ ID NO: 305580 - DNA, 21 bp, Artificial sequence
  SiRNA target sequence
atcgggtagctatagcagtcg

SEQ ID NO: 305581 - DNA, 21 bp, Artificial sequence
  SiRNA target sequence
tcgggtagctatagcagtcgg

SEQ ID NO: 305582 - DNA, 21 bp, Artificial sequence
  SiRNA target sequence
cgggtagctatagcagtcgga

SEQ ID NO: 305583 - DNA, 21 bp, Artificial sequence
  SiRNA target sequence
gggtagctatagcagtcggat

SEQ ID NO: 305584 - DNA, 21 bp, Artificial sequence
  SiRNA target sequence
ggtagctatagcagtcggata

SEQ ID NO: 305585 - DNA, 21 bp, Artificial sequence
  SiRNA target sequence
gtagctatagcagtcggatag

SEQ ID NO: 305586 - DNA, 21 bp, Artificial sequence
  SiRNA target sequence
tagctatagcagtcggatagt

SEQ ID NO: 305587 - DNA, 21 bp, Artificial sequence
  SiRNA target sequence
agctatagcagtcggatagta

SEQ ID NO: 305588 - DNA, 21 bp, Artificial sequence
  SiRNA target sequence
gctatagcagtcggatagtaa

SEQ ID NO: 305589 - DNA, 21 bp, Artificial sequence
  SiRNA target sequence
ctatagcagtcggatagtaat

SEQ ID NO: 305590 - DNA, 21 bp, Artificial sequence
  SiRNA target sequence
tatagcagtcggatagtaata

SEQ ID NO: 305591 - DNA, 21 bp, Artificial sequence
  SiRNA target sequence
atagcagtcggatagtaatat

SEQ ID NO: 305592 - DNA, 21 bp, Artificial sequence
  SiRNA target sequence
tagcagtcggatagtaatata

SEQ ID NO: 305593 - DNA, 21 bp, Artificial sequence
  SiRNA target sequence
agcagtcggatagtaatatat

SEQ ID NO: 305594 - DNA, 21 bp, Artificial sequence
  SiRNA target sequence
gcagtcggatagtaatatatc

SEQ ID NO: 305595 - DNA, 21 bp, Artificial sequence
  SiRNA target sequence
cagtcggatagtaatatatcc

SEQ ID NO: 305596 - DNA, 21 bp, Artificial sequence
  SiRNA target sequence
agtcggatagtaatatatccg

SEQ ID NO: 305597 - DNA, 21 bp, Artificial sequence
  SiRNA target sequence
gtcggatagtaatatatccgg

SEQ ID NO: 305598 - DNA, 21 bp, Artificial sequence
  SiRNA target sequence
tcggatagtaatatatccggc

SEQ ID NO: 305599 - DNA, 21 bp, Artificial sequence
  SiRNA target sequence
cggatagtaatatatccggcg

SEQ ID NO: 305600 - DNA, 21 bp, Artificial sequence
  SiRNA target sequence
ggatagtaatatatccggcgt

SEQ ID NO: 305601 - DNA, 21 bp, Artificial sequence
  SiRNA target sequence
gatagtaatatatccggcgtt

SEQ ID NO: 305602 - DNA, 21 bp, Artificial sequence
  SiRNA target sequence
atagtaatatatccggcgttt

SEQ ID NO: 305603 - DNA, 21 bp, Artificial sequence
  SiRNA target sequence
tagtaatatatccggcgtttc

SEQ ID NO: 305604 - DNA, 21 bp, Artificial sequence
  SiRNA target sequence
agtaatatatccggcgtttcg

SEQ ID NO: 305605 - DNA, 21 bp, Artificial sequence
  SiRNA target sequence
gtaatatatccggcgtttcga

SEQ ID NO: 305606 - DNA, 21 bp, Artificial sequence
  SiRNA target sequence
taatatatccggcgtttcgaa

SEQ ID NO: 305607 - DNA, 21 bp, Artificial sequence
  SiRNA target sequence
aatatatccggcgtttcgaaa

SEQ ID NO: 305608 - DNA, 21 bp, Artificial sequence
  SiRNA target sequence
atatatccggcgtttcgaaat

SEQ ID NO: 305609 - DNA, 21 bp, Artificial sequence
  SiRNA target sequence
tatatccggcgtttcgaaata

SEQ ID NO: 305610 - DNA, 21 bp, Artificial sequence
  SiRNA target sequence
atatccggcgtttcgaaatac

SEQ ID NO: 305611 - DNA, 21 bp, Artificial sequence
  SiRNA target sequence
tatccggcgtttcgaaatacc

SEQ ID NO: 305612 - DNA, 21 bp, Artificial sequence
  SiRNA target sequence
atccggcgtttcgaaatacca

SEQ ID NO: 305613 - DNA, 21 bp, Artificial sequence
  SiRNA target sequence
tccggcgtttcgaaataccat

SEQ ID NO: 305614 - DNA, 21 bp, Artificial sequence
  SiRNA target sequence
ccggcgtttcgaaataccata

SEQ ID NO: 305615 - DNA, 21 bp, Artificial sequence
  SiRNA target sequence
cggcgtttcgaaataccatac

SEQ ID NO: 305616 - DNA, 21 bp, Artificial sequence
  SiRNA target sequence
ggcgtttcgaaataccatacc

SEQ ID NO: 305617 - DNA, 21 bp, Artificial sequence
  SiRNA target sequence
gcgtttcgaaataccatacct

SEQ ID NO: 305618 - DNA, 21 bp, Artificial sequence
  SiRNA target sequence
cgtttcgaaataccatacctg

SEQ ID NO: 305619 - DNA, 21 bp, Artificial sequence
  SiRNA target sequence
gtttcgaaataccatacctgc

SEQ ID NO: 305620 - DNA, 21 bp, Artificial sequence
  SiRNA target sequence
tttcgaaataccatacctgct

SEQ ID NO: 305621 - DNA, 21 bp, Artificial sequence
  SiRNA target sequence
ttcgaaataccatacctgctg

SEQ ID NO: 305622 - DNA, 21 bp, Artificial sequence
  SiRNA target sequence
tcgaaataccatacctgctga

SEQ ID NO: 305623 - DNA, 21 bp, Artificial sequence
  SiRNA target sequence
cgaaataccatacctgctgat

SEQ ID NO: 305624 - DNA, 21 bp, Artificial sequence
  SiRNA target sequence
gaaataccatacctgctgata

SEQ ID NO: 305625 - DNA, 21 bp, Artificial sequence
  SiRNA target sequence
aaataccatacctgctgataa

SEQ ID NO: 305626 - DNA, 21 bp, Artificial sequence
  SiRNA target sequence
aataccatacctgctgataac

SEQ ID NO: 305627 - DNA, 21 bp, Artificial sequence
  SiRNA target sequence
ataccatacctgctgataacc

SEQ ID NO: 305628 - DNA, 21 bp, Artificial sequence
  SiRNA target sequence
taccatacctgctgataacca

SEQ ID NO: 305629 - DNA, 21 bp, Artificial sequence
  SiRNA target sequence
accatacctgctgataaccaa

SEQ ID NO: 305630 - DNA, 21 bp, Artificial sequence
  SiRNA target sequence
ccatacctgctgataaccaag

SEQ ID NO: 305631 - DNA, 21 bp, Artificial sequence
  SiRNA target sequence
catacctgctgataaccaaga

SEQ ID NO: 305632 - DNA, 21 bp, Artificial sequence
  SiRNA target sequence
atacctgctgataaccaagaa

SEQ ID NO: 305633 - DNA, 21 bp, Artificial sequence
  SiRNA target sequence
tacctgctgataaccaagaaa

SEQ ID NO: 305634 - DNA, 21 bp, Artificial sequence
  SiRNA target sequence
acctgctgataaccaagaaaa

SEQ ID NO: 305635 - DNA, 21 bp, Artificial sequence
  SiRNA target sequence
cctgctgataaccaagaaaac

SEQ ID NO: 305636 - DNA, 21 bp, Artificial sequence
  SiRNA target sequence
ctgctgataaccaagaaaacg

SEQ ID NO: 305637 - DNA, 21 bp, Artificial sequence
  SiRNA target sequence
tgctgataaccaagaaaacga

SEQ ID NO: 305638 - DNA, 21 bp, Artificial sequence
  SiRNA target sequence
gctgataaccaagaaaacgat

SEQ ID NO: 305639 - DNA, 21 bp, Artificial sequence
  SiRNA target sequence
ctgataaccaagaaaacgatt

SEQ ID NO: 305640 - DNA, 21 bp, Artificial sequence
  SiRNA target sequence
tgataaccaagaaaacgattc

SEQ ID NO: 305641 - DNA, 21 bp, Artificial sequence
  SiRNA target sequence
gataaccaagaaaacgattct

SEQ ID NO: 305642 - DNA, 21 bp, Artificial sequence
  SiRNA target sequence
ataaccaagaaaacgattcta

SEQ ID NO: 305643 - DNA, 21 bp, Artificial sequence
  SiRNA target sequence
taaccaagaaaacgattctac

SEQ ID NO: 305644 - DNA, 21 bp, Artificial sequence
  SiRNA target sequence
aaccaagaaaacgattctacc

SEQ ID NO: 305645 - DNA, 21 bp, Artificial sequence
  SiRNA target sequence
accaagaaaacgattctacca

SEQ ID NO: 305646 - DNA, 21 bp, Artificial sequence
  SiRNA target sequence
ccaagaaaacgattctaccaa

SEQ ID NO: 305647 - DNA, 21 bp, Artificial sequence
  SiRNA target sequence
caagaaaacgattctaccaat

SEQ ID NO: 305648 - DNA, 21 bp, Artificial sequence
  SiRNA target sequence
aagaaaacgattctaccaatg

SEQ ID NO: 305649 - DNA, 21 bp, Artificial sequence
  SiRNA target sequence
agaaaacgattctaccaatgt

SEQ ID NO: 305650 - DNA, 21 bp, Artificial sequence
  SiRNA target sequence
gaaaacgattctaccaatgta

SEQ ID NO: 305651 - DNA, 21 bp, Artificial sequence
  SiRNA target sequence
aaaacgattctaccaatgtac

SEQ ID NO: 305652 - DNA, 21 bp, Artificial sequence
  SiRNA target sequence
aaacgattctaccaatgtaca

SEQ ID NO: 305653 - DNA, 21 bp, Artificial sequence
  SiRNA target sequence
aacgattctaccaatgtacat

SEQ ID NO: 305654 - DNA, 21 bp, Artificial sequence
  SiRNA target sequence
acgattctaccaatgtacata

SEQ ID NO: 305655 - DNA, 21 bp, Artificial sequence
  SiRNA target sequence
cgattctaccaatgtacataa

SEQ ID NO: 305656 - DNA, 21 bp, Artificial sequence
  SiRNA target sequence
gattctaccaatgtacataac

SEQ ID NO: 305657 - DNA, 21 bp, Artificial sequence
  SiRNA target sequence
attctaccaatgtacataaca

SEQ ID NO: 305658 - DNA, 21 bp, Artificial sequence
  SiRNA target sequence
ttctaccaatgtacataacac

SEQ ID NO: 305659 - DNA, 21 bp, Artificial sequence
  SiRNA target sequence
tctaccaatgtacataacacg

SEQ ID NO: 305660 - DNA, 21 bp, Artificial sequence
  SiRNA target sequence
ctaccaatgtacataacacga

SEQ ID NO: 305661 - DNA, 21 bp, Artificial sequence
  SiRNA target sequence
taccaatgtacataacacgaa

SEQ ID NO: 305662 - DNA, 21 bp, Artificial sequence
  SiRNA target sequence
accaatgtacataacacgaaa

SEQ ID NO: 305663 - DNA, 21 bp, Artificial sequence
  SiRNA target sequence
ccaatgtacataacacgaaac

SEQ ID NO: 305664 - DNA, 21 bp, Artificial sequence
  SiRNA target sequence
caatgtacataacacgaaact

SEQ ID NO: 305665 - DNA, 21 bp, Artificial sequence
  SiRNA target sequence
aatgtacataacacgaaactc

SEQ ID NO: 305666 - DNA, 21 bp, Artificial sequence
  SiRNA target sequence
atgtacataacacgaaactcg

SEQ ID NO: 305667 - DNA, 21 bp, Artificial sequence
  SiRNA target sequence
tgtacataacacgaaactcgc

SEQ ID NO: 305668 - DNA, 21 bp, Artificial sequence
  SiRNA target sequence
gtacataacacgaaactcgcg

SEQ ID NO: 305669 - DNA, 21 bp, Artificial sequence
  SiRNA target sequence
tacataacacgaaactcgcgt

SEQ ID NO: 305670 - DNA, 21 bp, Artificial sequence
  SiRNA target sequence
acataacacgaaactcgcgtc

SEQ ID NO: 305671 - DNA, 21 bp, Artificial sequence
  SiRNA target sequence
cataacacgaaactcgcgtcg

SEQ ID NO: 305672 - DNA, 21 bp, Artificial sequence
  SiRNA target sequence
ataacacgaaactcgcgtcga

SEQ ID NO: 305673 - DNA, 21 bp, Artificial sequence
  SiRNA target sequence
taacacgaaactcgcgtcgac

SEQ ID NO: 305674 - DNA, 21 bp, Artificial sequence
  SiRNA target sequence
aacacgaaactcgcgtcgacc

SEQ ID NO: 305675 - DNA, 21 bp, Artificial sequence
  SiRNA target sequence
acacgaaactcgcgtcgacct

SEQ ID NO: 305676 - DNA, 21 bp, Artificial sequence
  SiRNA target sequence
cacgaaactcgcgtcgacctc

SEQ ID NO: 305677 - DNA, 21 bp, Artificial sequence
  SiRNA target sequence
acgaaactcgcgtcgacctca

SEQ ID NO: 305678 - DNA, 21 bp, Artificial sequence
  SiRNA target sequence
cgaaactcgcgtcgacctcag

SEQ ID NO: 305679 - DNA, 21 bp, Artificial sequence
  SiRNA target sequence
gaaactcgcgtcgacctcagc

SEQ ID NO: 305680 - DNA, 21 bp, Artificial sequence
  SiRNA target sequence
aaactcgcgtcgacctcagcg

SEQ ID NO: 305681 - DNA, 21 bp, Artificial sequence
  SiRNA target sequence
aactcgcgtcgacctcagcgg

SEQ ID NO: 305682 - DNA, 21 bp, Artificial sequence
  SiRNA target sequence
actcgcgtcgacctcagcgga

SEQ ID NO: 305683 - DNA, 21 bp, Artificial sequence
  SiRNA target sequence
ctcgcgtcgacctcagcggag

SEQ ID NO: 305684 - DNA, 21 bp, Artificial sequence
  SiRNA target sequence
tcgcgtcgacctcagcggaga

SEQ ID NO: 305685 - DNA, 21 bp, Artificial sequence
  SiRNA target sequence
cgcgtcgacctcagcggagaa

SEQ ID NO: 305686 - DNA, 21 bp, Artificial sequence
  SiRNA target sequence
gcgtcgacctcagcggagaat

SEQ ID NO: 305687 - DNA, 21 bp, Artificial sequence
  SiRNA target sequence
cgtcgacctcagcggagaatg

SEQ ID NO: 305688 - DNA, 21 bp, Artificial sequence
  SiRNA target sequence
gtcgacctcagcggagaatgc

SEQ ID NO: 305689 - DNA, 21 bp, Artificial sequence
  SiRNA target sequence
tcgacctcagcggagaatgcc

SEQ ID NO: 305690 - DNA, 21 bp, Artificial sequence
  SiRNA target sequence
cgacctcagcggagaatgcca

SEQ ID NO: 305691 - DNA, 21 bp, Artificial sequence
  SiRNA target sequence
gacctcagcggagaatgccat

SEQ ID NO: 305692 - DNA, 21 bp, Artificial sequence
  SiRNA target sequence
acctcagcggagaatgccatt

SEQ ID NO: 305693 - DNA, 21 bp, Artificial sequence
  SiRNA target sequence
cctcagcggagaatgccattg

SEQ ID NO: 305694 - DNA, 21 bp, Artificial sequence
  SiRNA target sequence
ctcagcggagaatgccattga

SEQ ID NO: 305695 - DNA, 21 bp, Artificial sequence
  SiRNA target sequence
tcagcggagaatgccattgag

SEQ ID NO: 305696 - DNA, 21 bp, Artificial sequence
  SiRNA target sequence
cagcggagaatgccattgaga

SEQ ID NO: 305697 - DNA, 21 bp, Artificial sequence
  SiRNA target sequence
agcggagaatgccattgagaa

SEQ ID NO: 305698 - DNA, 21 bp, Artificial sequence
  SiRNA target sequence
gcggagaatgccattgagaag

SEQ ID NO: 305699 - DNA, 21 bp, Artificial sequence
  SiRNA target sequence
cggagaatgccattgagaagg

SEQ ID NO: 305700 - DNA, 21 bp, Artificial sequence
  SiRNA target sequence
ggagaatgccattgagaagga

SEQ ID NO: 305701 - DNA, 21 bp, Artificial sequence
  SiRNA target sequence
gagaatgccattgagaaggaa

SEQ ID NO: 305702 - DNA, 21 bp, Artificial sequence
  SiRNA target sequence
agaatgccattgagaaggaac

SEQ ID NO: 305703 - DNA, 21 bp, Artificial sequence
  SiRNA target sequence
gaatgccattgagaaggaaca

SEQ ID NO: 305704 - DNA, 21 bp, Artificial sequence
  SiRNA target sequence
aatgccattgagaaggaacaa

SEQ ID NO: 305705 - DNA, 21 bp, Artificial sequence
  SiRNA target sequence
atgccattgagaaggaacaaa

SEQ ID NO: 305706 - DNA, 21 bp, Artificial sequence
  SiRNA target sequence
tgccattgagaaggaacaaat

SEQ ID NO: 305707 - DNA, 21 bp, Artificial sequence
  SiRNA target sequence
gccattgagaaggaacaaatc

SEQ ID NO: 305708 - DNA, 21 bp, Artificial sequence
  SiRNA target sequence
ccattgagaaggaacaaatca

SEQ ID NO: 305709 - DNA, 21 bp, Artificial sequence
  SiRNA target sequence
cattgagaaggaacaaatcac

SEQ ID NO: 305710 - DNA, 21 bp, Artificial sequence
  SiRNA target sequence
attgagaaggaacaaatcacc

SEQ ID NO: 305711 - DNA, 21 bp, Artificial sequence
  SiRNA target sequence
ttgagaaggaacaaatcacca

SEQ ID NO: 305712 - DNA, 21 bp, Artificial sequence
  SiRNA target sequence
tgagaaggaacaaatcaccac

SEQ ID NO: 305713 - DNA, 21 bp, Artificial sequence
  SiRNA target sequence
gagaaggaacaaatcaccacc

SEQ ID NO: 305714 - DNA, 21 bp, Artificial sequence
  SiRNA target sequence
agaaggaacaaatcaccacct

SEQ ID NO: 305715 - DNA, 21 bp, Artificial sequence
  SiRNA target sequence
gaaggaacaaatcaccacctt

SEQ ID NO: 305716 - DNA, 21 bp, Artificial sequence
  SiRNA target sequence
aaggaacaaatcaccaccttt

SEQ ID NO: 305717 - DNA, 21 bp, Artificial sequence
  SiRNA target sequence
aggaacaaatcaccacctttc

SEQ ID NO: 305718 - DNA, 21 bp, Artificial sequence
  SiRNA target sequence
ggaacaaatcaccacctttca

SEQ ID NO: 305719 - DNA, 21 bp, Artificial sequence
  SiRNA target sequence
gaacaaatcaccacctttcat

SEQ ID NO: 305720 - DNA, 21 bp, Artificial sequence
  SiRNA target sequence
aacaaatcaccacctttcatg

SEQ ID NO: 305721 - DNA, 21 bp, Artificial sequence
  SiRNA target sequence
acaaatcaccacctttcatga

SEQ ID NO: 305722 - DNA, 21 bp, Artificial sequence
  SiRNA target sequence
caaatcaccacctttcatgat

SEQ ID NO: 305723 - DNA, 21 bp, Artificial sequence
  SiRNA target sequence
aaatcaccacctttcatgatg

SEQ ID NO: 305724 - DNA, 21 bp, Artificial sequence
  SiRNA target sequence
aatcaccacctttcatgatgt

SEQ ID NO: 305725 - DNA, 21 bp, Artificial sequence
  SiRNA target sequence
atcaccacctttcatgatgtg

SEQ ID NO: 305726 - DNA, 21 bp, Artificial sequence
  SiRNA target sequence
tcaccacctttcatgatgtgg

SEQ ID NO: 305727 - DNA, 21 bp, Artificial sequence
  SiRNA target sequence
caccacctttcatgatgtgga

SEQ ID NO: 305728 - DNA, 21 bp, Artificial sequence
  SiRNA target sequence
accacctttcatgatgtggaa

SEQ ID NO: 305729 - DNA, 21 bp, Artificial sequence
  SiRNA target sequence
ccacctttcatgatgtggaaa

SEQ ID NO: 305730 - DNA, 21 bp, Artificial sequence
  SiRNA target sequence
cacctttcatgatgtggaaac

SEQ ID NO: 305731 - DNA, 21 bp, Artificial sequence
  SiRNA target sequence
acctttcatgatgtggaaact

SEQ ID NO: 305732 - DNA, 21 bp, Artificial sequence
  SiRNA target sequence
cctttcatgatgtggaaactc

SEQ ID NO: 305733 - DNA, 21 bp, Artificial sequence
  SiRNA target sequence
ctttcatgatgtggaaactcc

SEQ ID NO: 305734 - DNA, 21 bp, Artificial sequence
  SiRNA target sequence
tttcatgatgtggaaactcca

SEQ ID NO: 305735 - DNA, 21 bp, Artificial sequence
  SiRNA target sequence
ttcatgatgtggaaactccaa

SEQ ID NO: 305736 - DNA, 21 bp, Artificial sequence
  SiRNA target sequence
tcatgatgtggaaactccaaa

SEQ ID NO: 305737 - DNA, 21 bp, Artificial sequence
  SiRNA target sequence
catgatgtggaaactccaaat

SEQ ID NO: 305738 - DNA, 21 bp, Artificial sequence
  SiRNA target sequence
atgatgtggaaactccaaata

SEQ ID NO: 305739 - DNA, 21 bp, Artificial sequence
  SiRNA target sequence
tgatgtggaaactccaaatag

SEQ ID NO: 305740 - DNA, 21 bp, Artificial sequence
  SiRNA target sequence
gatgtggaaactccaaatagg

SEQ ID NO: 305741 - DNA, 21 bp, Artificial sequence
  SiRNA target sequence
atgtggaaactccaaatagga

SEQ ID NO: 305742 - DNA, 21 bp, Artificial sequence
  SiRNA target sequence
tgtggaaactccaaataggat

SEQ ID NO: 305743 - DNA, 21 bp, Artificial sequence
  SiRNA target sequence
gtggaaactccaaataggatc

SEQ ID NO: 305744 - DNA, 21 bp, Artificial sequence
  SiRNA target sequence
tggaaactccaaataggatcg

SEQ ID NO: 305745 - DNA, 21 bp, Artificial sequence
  SiRNA target sequence
ggaaactccaaataggatcga

SEQ ID NO: 305746 - DNA, 21 bp, Artificial sequence
  SiRNA target sequence
gaaactccaaataggatcgat

SEQ ID NO: 305747 - DNA, 21 bp, Artificial sequence
  SiRNA target sequence
aaactccaaataggatcgata

SEQ ID NO: 305748 - DNA, 21 bp, Artificial sequence
  SiRNA target sequence
aactccaaataggatcgatac

SEQ ID NO: 305749 - DNA, 21 bp, Artificial sequence
  SiRNA target sequence
actccaaataggatcgatacc

SEQ ID NO: 305750 - DNA, 21 bp, Artificial sequence
  SiRNA target sequence
ctccaaataggatcgataccc

SEQ ID NO: 305751 - DNA, 21 bp, Artificial sequence
  SiRNA target sequence
tccaaataggatcgatacccc

SEQ ID NO: 305752 - DNA, 21 bp, Artificial sequence
  SiRNA target sequence
ccaaataggatcgataccccc

SEQ ID NO: 305753 - DNA, 21 bp, Artificial sequence
  SiRNA target sequence
caaataggatcgataccccca

SEQ ID NO: 305754 - DNA, 21 bp, Artificial sequence
  SiRNA target sequence
aaataggatcgatacccccat

SEQ ID NO: 305755 - DNA, 21 bp, Artificial sequence
  SiRNA target sequence
aataggatcgatacccccatg

SEQ ID NO: 305756 - DNA, 21 bp, Artificial sequence
  SiRNA target sequence
ataggatcgatacccccatgg

SEQ ID NO: 305757 - DNA, 21 bp, Artificial sequence
  SiRNA target sequence
taggatcgatacccccatggc

SEQ ID NO: 305758 - DNA, 21 bp, Artificial sequence
  SiRNA target sequence
aggatcgatacccccatggct

SEQ ID NO: 305759 - DNA, 21 bp, Artificial sequence
  SiRNA target sequence
ggatcgatacccccatggctc

SEQ ID NO: 305760 - DNA, 21 bp, Artificial sequence
  SiRNA target sequence
gatcgatacccccatggctca

SEQ ID NO: 305761 - DNA, 21 bp, Artificial sequence
  SiRNA target sequence
atcgatacccccatggctcag

SEQ ID NO: 305762 - DNA, 21 bp, Artificial sequence
  SiRNA target sequence
tcgatacccccatggctcagg

SEQ ID NO: 305763 - DNA, 21 bp, Artificial sequence
  SiRNA target sequence
cgatacccccatggctcagga

SEQ ID NO: 305764 - DNA, 21 bp, Artificial sequence
  SiRNA target sequence
gatacccccatggctcaggat

SEQ ID NO: 305765 - DNA, 21 bp, Artificial sequence
  SiRNA target sequence
atacccccatggctcaggata

SEQ ID NO: 305766 - DNA, 21 bp, Artificial sequence
  SiRNA target sequence
tacccccatggctcaggatac

SEQ ID NO: 305767 - DNA, 21 bp, Artificial sequence
  SiRNA target sequence
acccccatggctcaggatact

SEQ ID NO: 305768 - DNA, 21 bp, Artificial sequence
  SiRNA target sequence
cccccatggctcaggatactt

SEQ ID NO: 305769 - DNA, 21 bp, Artificial sequence
  SiRNA target sequence
ccccatggctcaggatacttc

SEQ ID NO: 305770 - DNA, 21 bp, Artificial sequence
  SiRNA target sequence
cccatggctcaggatacttca

SEQ ID NO: 305771 - DNA, 21 bp, Artificial sequence
  SiRNA target sequence
ccatggctcaggatacttcat

SEQ ID NO: 305772 - DNA, 21 bp, Artificial sequence
  SiRNA target sequence
catggctcaggatacttcatc

SEQ ID NO: 305773 - DNA, 21 bp, Artificial sequence
  SiRNA target sequence
atggctcaggatacttcatcg

SEQ ID NO: 305774 - DNA, 21 bp, Artificial sequence
  SiRNA target sequence
tggctcaggatacttcatcgg

SEQ ID NO: 305775 - DNA, 21 bp, Artificial sequence
  SiRNA target sequence
ggctcaggatacttcatcggc

SEQ ID NO: 305776 - DNA, 21 bp, Artificial sequence
  SiRNA target sequence
gctcaggatacttcatcggct

SEQ ID NO: 305777 - DNA, 21 bp, Artificial sequence
  SiRNA target sequence
ctcaggatacttcatcggcta

SEQ ID NO: 305778 - DNA, 21 bp, Artificial sequence
  SiRNA target sequence
tcaggatacttcatcggctag

SEQ ID NO: 305779 - DNA, 21 bp, Artificial sequence
  SiRNA target sequence
caggatacttcatcggctagg

SEQ ID NO: 305780 - DNA, 21 bp, Artificial sequence
  SiRNA target sequence
aggatacttcatcggctagga

SEQ ID NO: 305781 - DNA, 21 bp, Artificial sequence
  SiRNA target sequence
ggatacttcatcggctaggag

SEQ ID NO: 305782 - DNA, 21 bp, Artificial sequence
  SiRNA target sequence
gatacttcatcggctaggagc

SEQ ID NO: 305783 - DNA, 21 bp, Artificial sequence
  SiRNA target sequence
atacttcatcggctaggagca

SEQ ID NO: 305784 - DNA, 21 bp, Artificial sequence
  SiRNA target sequence
tacttcatcggctaggagcat

SEQ ID NO: 305785 - DNA, 21 bp, Artificial sequence
  SiRNA target sequence
acttcatcggctaggagcatg

SEQ ID NO: 305786 - DNA, 21 bp, Artificial sequence
  SiRNA target sequence
cttcatcggctaggagcatgg

SEQ ID NO: 305787 - DNA, 21 bp, Artificial sequence
  SiRNA target sequence
ttcatcggctaggagcatgga

SEQ ID NO: 305788 - DNA, 21 bp, Artificial sequence
  SiRNA target sequence
tcatcggctaggagcatggat

SEQ ID NO: 305789 - DNA, 21 bp, Artificial sequence
  SiRNA target sequence
catcggctaggagcatggatg

SEQ ID NO: 305790 - DNA, 21 bp, Artificial sequence
  SiRNA target sequence
atcggctaggagcatggatga

SEQ ID NO: 305791 - DNA, 21 bp, Artificial sequence
  SiRNA target sequence
tcggctaggagcatggatgat

SEQ ID NO: 305792 - DNA, 21 bp, Artificial sequence
  SiRNA target sequence
cggctaggagcatggatgata

SEQ ID NO: 305793 - DNA, 21 bp, Artificial sequence
  SiRNA target sequence
ggctaggagcatggatgatac

SEQ ID NO: 305794 - DNA, 21 bp, Artificial sequence
  SiRNA target sequence
gctaggagcatggatgatacg

SEQ ID NO: 305795 - DNA, 21 bp, Artificial sequence
  SiRNA target sequence
ctaggagcatggatgatacgc

SEQ ID NO: 305796 - DNA, 21 bp, Artificial sequence
  SiRNA target sequence
taggagcatggatgatacgca

SEQ ID NO: 305797 - DNA, 21 bp, Artificial sequence
  SiRNA target sequence
aggagcatggatgatacgcac

SEQ ID NO: 305798 - DNA, 21 bp, Artificial sequence
  SiRNA target sequence
ggagcatggatgatacgcaca

SEQ ID NO: 305799 - DNA, 21 bp, Artificial sequence
  SiRNA target sequence
gagcatggatgatacgcacag

SEQ ID NO: 305800 - DNA, 21 bp, Artificial sequence
  SiRNA target sequence
agcatggatgatacgcacagt

SEQ ID NO: 305801 - DNA, 21 bp, Artificial sequence
  SiRNA target sequence
gcatggatgatacgcacagta

SEQ ID NO: 305802 - DNA, 21 bp, Artificial sequence
  SiRNA target sequence
catggatgatacgcacagtat

SEQ ID NO: 305803 - DNA, 21 bp, Artificial sequence
  SiRNA target sequence
atggatgatacgcacagtatt

SEQ ID NO: 305804 - DNA, 21 bp, Artificial sequence
  SiRNA target sequence
tggatgatacgcacagtatta

SEQ ID NO: 305805 - DNA, 21 bp, Artificial sequence
  SiRNA target sequence
ggatgatacgcacagtattat

SEQ ID NO: 305806 - DNA, 21 bp, Artificial sequence
  SiRNA target sequence
gatgatacgcacagtattatt

SEQ ID NO: 305807 - DNA, 21 bp, Artificial sequence
  SiRNA target sequence
atgatacgcacagtattattc

SEQ ID NO: 305808 - DNA, 21 bp, Artificial sequence
  SiRNA target sequence
tgatacgcacagtattattca

SEQ ID NO: 305809 - DNA, 21 bp, Artificial sequence
  SiRNA target sequence
gatacgcacagtattattcag

SEQ ID NO: 305810 - DNA, 21 bp, Artificial sequence
  SiRNA target sequence
atacgcacagtattattcagt

SEQ ID NO: 305811 - DNA, 21 bp, Artificial sequence
  SiRNA target sequence
tacgcacagtattattcagtt

SEQ ID NO: 305812 - DNA, 21 bp, Artificial sequence
  SiRNA target sequence
acgcacagtattattcagttt

SEQ ID NO: 305813 - DNA, 21 bp, Artificial sequence
  SiRNA target sequence
cgcacagtattattcagtttc

SEQ ID NO: 305814 - DNA, 21 bp, Artificial sequence
  SiRNA target sequence
gcacagtattattcagtttct

SEQ ID NO: 305815 - DNA, 21 bp, Artificial sequence
  SiRNA target sequence
cacagtattattcagtttcta

SEQ ID NO: 305816 - DNA, 21 bp, Artificial sequence
  SiRNA target sequence
acagtattattcagtttctac

SEQ ID NO: 305817 - DNA, 21 bp, Artificial sequence
  SiRNA target sequence
cagtattattcagtttctaca

SEQ ID NO: 305818 - DNA, 21 bp, Artificial sequence
  SiRNA target sequence
agtattattcagtttctacaa

SEQ ID NO: 305819 - DNA, 21 bp, Artificial sequence
  SiRNA target sequence
gtattattcagtttctacaac

SEQ ID NO: 305820 - DNA, 21 bp, Artificial sequence
  SiRNA target sequence
tattattcagtttctacaacg

SEQ ID NO: 305821 - DNA, 21 bp, Artificial sequence
  SiRNA target sequence
attattcagtttctacaacgc

SEQ ID NO: 305822 - DNA, 21 bp, Artificial sequence
  SiRNA target sequence
ttattcagtttctacaacgcc

SEQ ID NO: 305823 - DNA, 21 bp, Artificial sequence
  SiRNA target sequence
tattcagtttctacaacgccc

SEQ ID NO: 305824 - DNA, 21 bp, Artificial sequence
  SiRNA target sequence
attcagtttctacaacgcccc

SEQ ID NO: 305825 - DNA, 21 bp, Artificial sequence
  SiRNA target sequence
ttcagtttctacaacgccccg

SEQ ID NO: 305826 - DNA, 21 bp, Artificial sequence
  SiRNA target sequence
tcagtttctacaacgccccgt

SEQ ID NO: 305827 - DNA, 21 bp, Artificial sequence
  SiRNA target sequence
cagtttctacaacgccccgtt

SEQ ID NO: 305828 - DNA, 21 bp, Artificial sequence
  SiRNA target sequence
agtttctacaacgccccgttc

SEQ ID NO: 305829 - DNA, 21 bp, Artificial sequence
  SiRNA target sequence
gtttctacaacgccccgttct

SEQ ID NO: 305830 - DNA, 21 bp, Artificial sequence
  SiRNA target sequence
tttctacaacgccccgttctc

SEQ ID NO: 305831 - DNA, 21 bp, Artificial sequence
  SiRNA target sequence
ttctacaacgccccgttctca

SEQ ID NO: 305832 - DNA, 21 bp, Artificial sequence
  SiRNA target sequence
tctacaacgccccgttctcat

SEQ ID NO: 305833 - DNA, 21 bp, Artificial sequence
  SiRNA target sequence
ctacaacgccccgttctcatt

SEQ ID NO: 305834 - DNA, 21 bp, Artificial sequence
  SiRNA target sequence
tacaacgccccgttctcattg

SEQ ID NO: 305835 - DNA, 21 bp, Artificial sequence
  SiRNA target sequence
acaacgccccgttctcattga

SEQ ID NO: 305836 - DNA, 21 bp, Artificial sequence
  SiRNA target sequence
caacgccccgttctcattgac

SEQ ID NO: 305837 - DNA, 21 bp, Artificial sequence
  SiRNA target sequence
aacgccccgttctcattgaca

SEQ ID NO: 305838 - DNA, 21 bp, Artificial sequence
  SiRNA target sequence
acgccccgttctcattgacaa

SEQ ID NO: 305839 - DNA, 21 bp, Artificial sequence
  SiRNA target sequence
cgccccgttctcattgacaac

SEQ ID NO: 305840 - DNA, 21 bp, Artificial sequence
  SiRNA target sequence
gccccgttctcattgacaaca

SEQ ID NO: 305841 - DNA, 21 bp, Artificial sequence
  SiRNA target sequence
ccccgttctcattgacaacat

SEQ ID NO: 305842 - DNA, 21 bp, Artificial sequence
  SiRNA target sequence
cccgttctcattgacaacatt

SEQ ID NO: 305843 - DNA, 21 bp, Artificial sequence
  SiRNA target sequence
ccgttctcattgacaacattg

SEQ ID NO: 305844 - DNA, 21 bp, Artificial sequence
  SiRNA target sequence
cgttctcattgacaacattga

SEQ ID NO: 305845 - DNA, 21 bp, Artificial sequence
  SiRNA target sequence
gttctcattgacaacattgag

SEQ ID NO: 305846 - DNA, 21 bp, Artificial sequence
  SiRNA target sequence
ttctcattgacaacattgaga

SEQ ID NO: 305847 - DNA, 21 bp, Artificial sequence
  SiRNA target sequence
tctcattgacaacattgagat

SEQ ID NO: 305848 - DNA, 21 bp, Artificial sequence
  SiRNA target sequence
ctcattgacaacattgagatt

SEQ ID NO: 305849 - DNA, 21 bp, Artificial sequence
  SiRNA target sequence
tcattgacaacattgagattg

SEQ ID NO: 305850 - DNA, 21 bp, Artificial sequence
  SiRNA target sequence
cattgacaacattgagattgt

SEQ ID NO: 305851 - DNA, 21 bp, Artificial sequence
  SiRNA target sequence
attgacaacattgagattgtt

SEQ ID NO: 305852 - DNA, 21 bp, Artificial sequence
  SiRNA target sequence
ttgacaacattgagattgttg

SEQ ID NO: 305853 - DNA, 21 bp, Artificial sequence
  SiRNA target sequence
tgacaacattgagattgttgc

SEQ ID NO: 305854 - DNA, 21 bp, Artificial sequence
  SiRNA target sequence
gacaacattgagattgttgca

SEQ ID NO: 305855 - DNA, 21 bp, Artificial sequence
  SiRNA target sequence
acaacattgagattgttgcag

SEQ ID NO: 305856 - DNA, 21 bp, Artificial sequence
  SiRNA target sequence
caacattgagattgttgcagg

SEQ ID NO: 305857 - DNA, 21 bp, Artificial sequence
  SiRNA target sequence
aacattgagattgttgcagga

SEQ ID NO: 305858 - DNA, 21 bp, Artificial sequence
  SiRNA target sequence
acattgagattgttgcaggaa

SEQ ID NO: 305859 - DNA, 21 bp, Artificial sequence
  SiRNA target sequence
cattgagattgttgcaggaac

SEQ ID NO: 305860 - DNA, 21 bp, Artificial sequence
  SiRNA target sequence
attgagattgttgcaggaaca

SEQ ID NO: 305861 - DNA, 21 bp, Artificial sequence
  SiRNA target sequence
ttgagattgttgcaggaacaa

SEQ ID NO: 305862 - DNA, 21 bp, Artificial sequence
  SiRNA target sequence
tgagattgttgcaggaacaac

SEQ ID NO: 305863 - DNA, 21 bp, Artificial sequence
  SiRNA target sequence
gagattgttgcaggaacaact

SEQ ID NO: 305864 - DNA, 21 bp, Artificial sequence
  SiRNA target sequence
agattgttgcaggaacaactg

SEQ ID NO: 305865 - DNA, 21 bp, Artificial sequence
  SiRNA target sequence
gattgttgcaggaacaactgc

SEQ ID NO: 305866 - DNA, 21 bp, Artificial sequence
  SiRNA target sequence
attgttgcaggaacaactgcc

SEQ ID NO: 305867 - DNA, 21 bp, Artificial sequence
  SiRNA target sequence
ttgttgcaggaacaactgccg

SEQ ID NO: 305868 - DNA, 21 bp, Artificial sequence
  SiRNA target sequence
tgttgcaggaacaactgccga

SEQ ID NO: 305869 - DNA, 21 bp, Artificial sequence
  SiRNA target sequence
gttgcaggaacaactgccgat

SEQ ID NO: 305870 - DNA, 21 bp, Artificial sequence
  SiRNA target sequence
ttgcaggaacaactgccgata

SEQ ID NO: 305871 - DNA, 21 bp, Artificial sequence
  SiRNA target sequence
tgcaggaacaactgccgataa

SEQ ID NO: 305872 - DNA, 21 bp, Artificial sequence
  SiRNA target sequence
gcaggaacaactgccgataac

SEQ ID NO: 305873 - DNA, 21 bp, Artificial sequence
  SiRNA target sequence
caggaacaactgccgataaca

SEQ ID NO: 305874 - DNA, 21 bp, Artificial sequence
  SiRNA target sequence
aggaacaactgccgataacaa

SEQ ID NO: 305875 - DNA, 21 bp, Artificial sequence
  SiRNA target sequence
ggaacaactgccgataacaac

SEQ ID NO: 305876 - DNA, 21 bp, Artificial sequence
  SiRNA target sequence
gaacaactgccgataacaaca

SEQ ID NO: 305877 - DNA, 21 bp, Artificial sequence
  SiRNA target sequence
aacaactgccgataacaacac

SEQ ID NO: 305878 - DNA, 21 bp, Artificial sequence
  SiRNA target sequence
acaactgccgataacaacaca

SEQ ID NO: 305879 - DNA, 21 bp, Artificial sequence
  SiRNA target sequence
caactgccgataacaacacag

SEQ ID NO: 305880 - DNA, 21 bp, Artificial sequence
  SiRNA target sequence
aactgccgataacaacacagc

SEQ ID NO: 305881 - DNA, 21 bp, Artificial sequence
  SiRNA target sequence
actgccgataacaacacagca

SEQ ID NO: 305882 - DNA, 21 bp, Artificial sequence
  SiRNA target sequence
ctgccgataacaacacagcac

SEQ ID NO: 305883 - DNA, 21 bp, Artificial sequence
  SiRNA target sequence
tgccgataacaacacagcact

SEQ ID NO: 305884 - DNA, 21 bp, Artificial sequence
  SiRNA target sequence
gccgataacaacacagcactc

SEQ ID NO: 305885 - DNA, 21 bp, Artificial sequence
  SiRNA target sequence
ccgataacaacacagcactca

SEQ ID NO: 305886 - DNA, 21 bp, Artificial sequence
  SiRNA target sequence
cgataacaacacagcactcag

SEQ ID NO: 305887 - DNA, 21 bp, Artificial sequence
  SiRNA target sequence
gataacaacacagcactcagt

SEQ ID NO: 305888 - DNA, 21 bp, Artificial sequence
  SiRNA target sequence
ataacaacacagcactcagta

SEQ ID NO: 305889 - DNA, 21 bp, Artificial sequence
  SiRNA target sequence
taacaacacagcactcagtag

SEQ ID NO: 305890 - DNA, 21 bp, Artificial sequence
  SiRNA target sequence
aacaacacagcactcagtaga

SEQ ID NO: 305891 - DNA, 21 bp, Artificial sequence
  SiRNA target sequence
acaacacagcactcagtagat

SEQ ID NO: 305892 - DNA, 21 bp, Artificial sequence
  SiRNA target sequence
caacacagcactcagtagata

SEQ ID NO: 305893 - DNA, 21 bp, Artificial sequence
  SiRNA target sequence
aacacagcactcagtagatat

SEQ ID NO: 305894 - DNA, 21 bp, Artificial sequence
  SiRNA target sequence
acacagcactcagtagatatg

SEQ ID NO: 305895 - DNA, 21 bp, Artificial sequence
  SiRNA target sequence
cacagcactcagtagatatgt

SEQ ID NO: 305896 - DNA, 21 bp, Artificial sequence
  SiRNA target sequence
acagcactcagtagatatgtg

SEQ ID NO: 305897 - DNA, 21 bp, Artificial sequence
  SiRNA target sequence
cagcactcagtagatatgtgc

SEQ ID NO: 305898 - DNA, 21 bp, Artificial sequence
  SiRNA target sequence
agcactcagtagatatgtgct

SEQ ID NO: 305899 - DNA, 21 bp, Artificial sequence
  SiRNA target sequence
gcactcagtagatatgtgcta

SEQ ID NO: 305900 - DNA, 21 bp, Artificial sequence
  SiRNA target sequence
cactcagtagatatgtgctag

SEQ ID NO: 305901 - DNA, 21 bp, Artificial sequence
  SiRNA target sequence
actcagtagatatgtgctaga

SEQ ID NO: 305902 - DNA, 21 bp, Artificial sequence
  SiRNA target sequence
ctcagtagatatgtgctagat

SEQ ID NO: 305903 - DNA, 21 bp, Artificial sequence
  SiRNA target sequence
tcagtagatatgtgctagata

SEQ ID NO: 305904 - DNA, 21 bp, Artificial sequence
  SiRNA target sequence
cagtagatatgtgctagatag

SEQ ID NO: 305905 - DNA, 21 bp, Artificial sequence
  SiRNA target sequence
agtagatatgtgctagataga

SEQ ID NO: 305906 - DNA, 21 bp, Artificial sequence
  SiRNA target sequence
gtagatatgtgctagatagaa

SEQ ID NO: 305907 - DNA, 21 bp, Artificial sequence
  SiRNA target sequence
tagatatgtgctagatagaac

SEQ ID NO: 305908 - DNA, 21 bp, Artificial sequence
  SiRNA target sequence
agatatgtgctagatagaaca

SEQ ID NO: 305909 - DNA, 21 bp, Artificial sequence
  SiRNA target sequence
gatatgtgctagatagaacaa

SEQ ID NO: 305910 - DNA, 21 bp, Artificial sequence
  SiRNA target sequence
atatgtgctagatagaacaaa

SEQ ID NO: 305911 - DNA, 21 bp, Artificial sequence
  SiRNA target sequence
tatgtgctagatagaacaaac

SEQ ID NO: 305912 - DNA, 21 bp, Artificial sequence
  SiRNA target sequence
atgtgctagatagaacaaacc

SEQ ID NO: 305913 - DNA, 21 bp, Artificial sequence
  SiRNA target sequence
tgtgctagatagaacaaaccc

SEQ ID NO: 305914 - DNA, 21 bp, Artificial sequence
  SiRNA target sequence
gtgctagatagaacaaacccg

SEQ ID NO: 305915 - DNA, 21 bp, Artificial sequence
  SiRNA target sequence
tgctagatagaacaaacccgc

SEQ ID NO: 305916 - DNA, 21 bp, Artificial sequence
  SiRNA target sequence
gctagatagaacaaacccgca

SEQ ID NO: 305917 - DNA, 21 bp, Artificial sequence
  SiRNA target sequence
ctagatagaacaaacccgcaa

SEQ ID NO: 305918 - DNA, 21 bp, Artificial sequence
  SiRNA target sequence
tagatagaacaaacccgcaaa

SEQ ID NO: 305919 - DNA, 21 bp, Artificial sequence
  SiRNA target sequence
agatagaacaaacccgcaaaa

SEQ ID NO: 305920 - DNA, 21 bp, Artificial sequence
  SiRNA target sequence
gatagaacaaacccgcaaaaa

SEQ ID NO: 305921 - DNA, 21 bp, Artificial sequence
  SiRNA target sequence
atagaacaaacccgcaaaaat

SEQ ID NO: 305922 - DNA, 21 bp, Artificial sequence
  SiRNA target sequence
tagaacaaacccgcaaaaata

SEQ ID NO: 305923 - DNA, 21 bp, Artificial sequence
  SiRNA target sequence
agaacaaacccgcaaaaatac

SEQ ID NO: 305924 - DNA, 21 bp, Artificial sequence
  SiRNA target sequence
gaacaaacccgcaaaaataca

SEQ ID NO: 305925 - DNA, 21 bp, Artificial sequence
  SiRNA target sequence
aacaaacccgcaaaaatacat

SEQ ID NO: 305926 - DNA, 21 bp, Artificial sequence
  SiRNA target sequence
acaaacccgcaaaaatacatt

SEQ ID NO: 305927 - DNA, 21 bp, Artificial sequence
  SiRNA target sequence
caaacccgcaaaaatacatta

SEQ ID NO: 305928 - DNA, 21 bp, Artificial sequence
  SiRNA target sequence
aaacccgcaaaaatacattaa

SEQ ID NO: 305929 - DNA, 21 bp, Artificial sequence
  SiRNA target sequence
aacccgcaaaaatacattaaa

SEQ ID NO: 305930 - DNA, 21 bp, Artificial sequence
  SiRNA target sequence
acccgcaaaaatacattaaac

SEQ ID NO: 305931 - DNA, 21 bp, Artificial sequence
  SiRNA target sequence
cccgcaaaaatacattaaaca

SEQ ID NO: 305932 - DNA, 21 bp, Artificial sequence
  SiRNA target sequence
ccgcaaaaatacattaaacaa

SEQ ID NO: 305933 - DNA, 21 bp, Artificial sequence
  SiRNA target sequence
cgcaaaaatacattaaacaat

SEQ ID NO: 305934 - DNA, 21 bp, Artificial sequence
  SiRNA target sequence
gcaaaaatacattaaacaatg

SEQ ID NO: 305935 - DNA, 21 bp, Artificial sequence
  SiRNA target sequence
caaaaatacattaaacaatgg

SEQ ID NO: 305936 - DNA, 21 bp, Artificial sequence
  SiRNA target sequence
aaaaatacattaaacaatgga

SEQ ID NO: 305937 - DNA, 21 bp, Artificial sequence
  SiRNA target sequence
aaaatacattaaacaatggac

SEQ ID NO: 305938 - DNA, 21 bp, Artificial sequence
  SiRNA target sequence
aaatacattaaacaatggaca

SEQ ID NO: 305939 - DNA, 21 bp, Artificial sequence
  SiRNA target sequence
aatacattaaacaatggacat

SEQ ID NO: 305940 - DNA, 21 bp, Artificial sequence
  SiRNA target sequence
atacattaaacaatggacatt

SEQ ID NO: 305941 - DNA, 21 bp, Artificial sequence
  SiRNA target sequence
tacattaaacaatggacatta

SEQ ID NO: 305942 - DNA, 21 bp, Artificial sequence
  SiRNA target sequence
acattaaacaatggacattac

SEQ ID NO: 305943 - DNA, 21 bp, Artificial sequence
  SiRNA target sequence
cattaaacaatggacattacc

SEQ ID NO: 305944 - DNA, 21 bp, Artificial sequence
  SiRNA target sequence
attaaacaatggacattacca

SEQ ID NO: 305945 - DNA, 21 bp, Artificial sequence
  SiRNA target sequence
ttaaacaatggacattaccat

SEQ ID NO: 305946 - DNA, 21 bp, Artificial sequence
  SiRNA target sequence
taaacaatggacattaccatc

SEQ ID NO: 305947 - DNA, 21 bp, Artificial sequence
  SiRNA target sequence
aaacaatggacattaccatca

SEQ ID NO: 305948 - DNA, 21 bp, Artificial sequence
  SiRNA target sequence
aacaatggacattaccatcaa

SEQ ID NO: 305949 - DNA, 21 bp, Artificial sequence
  SiRNA target sequence
acaatggacattaccatcaac

SEQ ID NO: 305950 - DNA, 21 bp, Artificial sequence
  SiRNA target sequence
caatggacattaccatcaaca

SEQ ID NO: 305951 - DNA, 21 bp, Artificial sequence
  SiRNA target sequence
aatggacattaccatcaacag

SEQ ID NO: 305952 - DNA, 21 bp, Artificial sequence
  SiRNA target sequence
atggacattaccatcaacagt

SEQ ID NO: 305953 - DNA, 21 bp, Artificial sequence
  SiRNA target sequence
tggacattaccatcaacagtg

SEQ ID NO: 305954 - DNA, 21 bp, Artificial sequence
  SiRNA target sequence
ggacattaccatcaacagtgt

SEQ ID NO: 305955 - DNA, 21 bp, Artificial sequence
  SiRNA target sequence
gacattaccatcaacagtgtt

SEQ ID NO: 305956 - DNA, 21 bp, Artificial sequence
  SiRNA target sequence
acattaccatcaacagtgttg

SEQ ID NO: 305957 - DNA, 21 bp, Artificial sequence
  SiRNA target sequence
cattaccatcaacagtgttga

SEQ ID NO: 305958 - DNA, 21 bp, Artificial sequence
  SiRNA target sequence
attaccatcaacagtgttgaa

SEQ ID NO: 305959 - DNA, 21 bp, Artificial sequence
  SiRNA target sequence
ttaccatcaacagtgttgaaa

SEQ ID NO: 305960 - DNA, 21 bp, Artificial sequence
  SiRNA target sequence
taccatcaacagtgttgaaag

SEQ ID NO: 305961 - DNA, 21 bp, Artificial sequence
  SiRNA target sequence
accatcaacagtgttgaaagc

SEQ ID NO: 305962 - DNA, 21 bp, Artificial sequence
  SiRNA target sequence
ccatcaacagtgttgaaagct

SEQ ID NO: 305963 - DNA, 21 bp, Artificial sequence
  SiRNA target sequence
catcaacagtgttgaaagctg

SEQ ID NO: 305964 - DNA, 21 bp, Artificial sequence
  SiRNA target sequence
atcaacagtgttgaaagctgg

SEQ ID NO: 305965 - DNA, 21 bp, Artificial sequence
  SiRNA target sequence
tcaacagtgttgaaagctggt

SEQ ID NO: 305966 - DNA, 21 bp, Artificial sequence
  SiRNA target sequence
caacagtgttgaaagctggtg

SEQ ID NO: 305967 - DNA, 21 bp, Artificial sequence
  SiRNA target sequence
aacagtgttgaaagctggtgg

SEQ ID NO: 305968 - DNA, 21 bp, Artificial sequence
  SiRNA target sequence
acagtgttgaaagctggtgga

SEQ ID NO: 305969 - DNA, 21 bp, Artificial sequence
  SiRNA target sequence
cagtgttgaaagctggtggaa

SEQ ID NO: 305970 - DNA, 21 bp, Artificial sequence
  SiRNA target sequence
agtgttgaaagctggtggaaa

SEQ ID NO: 305971 - DNA, 21 bp, Artificial sequence
  SiRNA target sequence
gtgttgaaagctggtggaaaa

SEQ ID NO: 305972 - DNA, 21 bp, Artificial sequence
  SiRNA target sequence
tgttgaaagctggtggaaaag

SEQ ID NO: 305973 - DNA, 21 bp, Artificial sequence
  SiRNA target sequence
gttgaaagctggtggaaaagc

SEQ ID NO: 305974 - DNA, 21 bp, Artificial sequence
  SiRNA target sequence
ttgaaagctggtggaaaagcc

SEQ ID NO: 305975 - DNA, 21 bp, Artificial sequence
  SiRNA target sequence
tgaaagctggtggaaaagccc

SEQ ID NO: 305976 - DNA, 21 bp, Artificial sequence
  SiRNA target sequence
gaaagctggtggaaaagccca

SEQ ID NO: 305977 - DNA, 21 bp, Artificial sequence
  SiRNA target sequence
aaagctggtggaaaagcccaa

SEQ ID NO: 305978 - DNA, 21 bp, Artificial sequence
  SiRNA target sequence
aagctggtggaaaagcccaaa

SEQ ID NO: 305979 - DNA, 21 bp, Artificial sequence
  SiRNA target sequence
agctggtggaaaagcccaaaa

SEQ ID NO: 305980 - DNA, 21 bp, Artificial sequence
  SiRNA target sequence
gctggtggaaaagcccaaaag

SEQ ID NO: 305981 - DNA, 21 bp, Artificial sequence
  SiRNA target sequence
ctggtggaaaagcccaaaagc

SEQ ID NO: 305982 - DNA, 21 bp, Artificial sequence
  SiRNA target sequence
tggtggaaaagcccaaaagct

SEQ ID NO: 305983 - DNA, 21 bp, Artificial sequence
  SiRNA target sequence
ggtggaaaagcccaaaagctt

SEQ ID NO: 305984 - DNA, 21 bp, Artificial sequence
  SiRNA target sequence
gtggaaaagcccaaaagcttg

SEQ ID NO: 305985 - DNA, 21 bp, Artificial sequence
  SiRNA target sequence
tggaaaagcccaaaagcttgc

SEQ ID NO: 305986 - DNA, 21 bp, Artificial sequence
  SiRNA target sequence
ggaaaagcccaaaagcttgcc

SEQ ID NO: 305987 - DNA, 21 bp, Artificial sequence
  SiRNA target sequence
gaaaagcccaaaagcttgcca

SEQ ID NO: 305988 - DNA, 21 bp, Artificial sequence
  SiRNA target sequence
aaaagcccaaaagcttgccaa

SEQ ID NO: 305989 - DNA, 21 bp, Artificial sequence
  SiRNA target sequence
aaagcccaaaagcttgccaac

SEQ ID NO: 305990 - DNA, 21 bp, Artificial sequence
  SiRNA target sequence
aagcccaaaagcttgccaact

SEQ ID NO: 305991 - DNA, 21 bp, Artificial sequence
  SiRNA target sequence
agcccaaaagcttgccaactt

SEQ ID NO: 305992 - DNA, 21 bp, Artificial sequence
  SiRNA target sequence
gcccaaaagcttgccaacttt

SEQ ID NO: 305993 - DNA, 21 bp, Artificial sequence
  SiRNA target sequence
cccaaaagcttgccaacttta

SEQ ID NO: 305994 - DNA, 21 bp, Artificial sequence
  SiRNA target sequence
ccaaaagcttgccaactttaa

SEQ ID NO: 305995 - DNA, 21 bp, Artificial sequence
  SiRNA target sequence
caaaagcttgccaactttaaa

SEQ ID NO: 305996 - DNA, 21 bp, Artificial sequence
  SiRNA target sequence
aaaagcttgccaactttaaat

SEQ ID NO: 305997 - DNA, 21 bp, Artificial sequence
  SiRNA target sequence
aaagcttgccaactttaaata

SEQ ID NO: 305998 - DNA, 21 bp, Artificial sequence
  SiRNA target sequence
aagcttgccaactttaaatat

SEQ ID NO: 305999 - DNA, 21 bp, Artificial sequence
  SiRNA target sequence
agcttgccaactttaaatatt

SEQ ID NO: 306000 - DNA, 21 bp, Artificial sequence
  SiRNA target sequence
gcttgccaactttaaatattt

SEQ ID NO: 306001 - DNA, 21 bp, Artificial sequence
  SiRNA target sequence
cttgccaactttaaatatttg

SEQ ID NO: 306002 - DNA, 21 bp, Artificial sequence
  SiRNA target sequence
ttgccaactttaaatatttgc

SEQ ID NO: 306003 - DNA, 21 bp, Artificial sequence
  SiRNA target sequence
tgccaactttaaatatttgcg

SEQ ID NO: 306004 - DNA, 21 bp, Artificial sequence
  SiRNA target sequence
gccaactttaaatatttgcga

SEQ ID NO: 306005 - DNA, 21 bp, Artificial sequence
  SiRNA target sequence
ccaactttaaatatttgcgat

SEQ ID NO: 306006 - DNA, 21 bp, Artificial sequence
  SiRNA target sequence
caactttaaatatttgcgatg

SEQ ID NO: 306007 - DNA, 21 bp, Artificial sequence
  SiRNA target sequence
aactttaaatatttgcgatgt

SEQ ID NO: 306008 - DNA, 21 bp, Artificial sequence
  SiRNA target sequence
actttaaatatttgcgatgtg

SEQ ID NO: 306009 - DNA, 21 bp, Artificial sequence
  SiRNA target sequence
ctttaaatatttgcgatgtga

SEQ ID NO: 306010 - DNA, 21 bp, Artificial sequence
  SiRNA target sequence
tttaaatatttgcgatgtgat

SEQ ID NO: 306011 - DNA, 21 bp, Artificial sequence
  SiRNA target sequence
ttaaatatttgcgatgtgatg

SEQ ID NO: 306012 - DNA, 21 bp, Artificial sequence
  SiRNA target sequence
taaatatttgcgatgtgatgt

SEQ ID NO: 306013 - DNA, 21 bp, Artificial sequence
  SiRNA target sequence
aaatatttgcgatgtgatgta

SEQ ID NO: 306014 - DNA, 21 bp, Artificial sequence
  SiRNA target sequence
aatatttgcgatgtgatgtac

SEQ ID NO: 306015 - DNA, 21 bp, Artificial sequence
  SiRNA target sequence
atatttgcgatgtgatgtaca

SEQ ID NO: 306016 - DNA, 21 bp, Artificial sequence
  SiRNA target sequence
tatttgcgatgtgatgtacaa

SEQ ID NO: 306017 - DNA, 21 bp, Artificial sequence
  SiRNA target sequence
atttgcgatgtgatgtacaag

SEQ ID NO: 306018 - DNA, 21 bp, Artificial sequence
  SiRNA target sequence
tttgcgatgtgatgtacaagt

SEQ ID NO: 306019 - DNA, 21 bp, Artificial sequence
  SiRNA target sequence
ttgcgatgtgatgtacaagtg

SEQ ID NO: 306020 - DNA, 21 bp, Artificial sequence
  SiRNA target sequence
tgcgatgtgatgtacaagtga

SEQ ID NO: 306021 - DNA, 21 bp, Artificial sequence
  SiRNA target sequence
gcgatgtgatgtacaagtgaa

SEQ ID NO: 306022 - DNA, 21 bp, Artificial sequence
  SiRNA target sequence
cgatgtgatgtacaagtgaaa

SEQ ID NO: 306023 - DNA, 21 bp, Artificial sequence
  SiRNA target sequence
gatgtgatgtacaagtgaaaa

SEQ ID NO: 306024 - DNA, 21 bp, Artificial sequence
  SiRNA target sequence
atgtgatgtacaagtgaaaat

SEQ ID NO: 306025 - DNA, 21 bp, Artificial sequence
  SiRNA target sequence
tgtgatgtacaagtgaaaatt

SEQ ID NO: 306026 - DNA, 21 bp, Artificial sequence
  SiRNA target sequence
gtgatgtacaagtgaaaattg

SEQ ID NO: 306027 - DNA, 21 bp, Artificial sequence
  SiRNA target sequence
tgatgtacaagtgaaaattgt

SEQ ID NO: 306028 - DNA, 21 bp, Artificial sequence
  SiRNA target sequence
gatgtacaagtgaaaattgta

SEQ ID NO: 306029 - DNA, 21 bp, Artificial sequence
  SiRNA target sequence
atgtacaagtgaaaattgtat

SEQ ID NO: 306030 - DNA, 21 bp, Artificial sequence
  SiRNA target sequence
tgtacaagtgaaaattgtatt

SEQ ID NO: 306031 - DNA, 21 bp, Artificial sequence
  SiRNA target sequence
gtacaagtgaaaattgtattg

SEQ ID NO: 306032 - DNA, 21 bp, Artificial sequence
  SiRNA target sequence
tacaagtgaaaattgtattga

SEQ ID NO: 306033 - DNA, 21 bp, Artificial sequence
  SiRNA target sequence
acaagtgaaaattgtattgaa

SEQ ID NO: 306034 - DNA, 21 bp, Artificial sequence
  SiRNA target sequence
caagtgaaaattgtattgaat

SEQ ID NO: 306035 - DNA, 21 bp, Artificial sequence
  SiRNA target sequence
aagtgaaaattgtattgaatg

SEQ ID NO: 306036 - DNA, 21 bp, Artificial sequence
  SiRNA target sequence
agtgaaaattgtattgaatgc

SEQ ID NO: 306037 - DNA, 21 bp, Artificial sequence
  SiRNA target sequence
gtgaaaattgtattgaatgct

SEQ ID NO: 306038 - DNA, 21 bp, Artificial sequence
  SiRNA target sequence
tgaaaattgtattgaatgcta

SEQ ID NO: 306039 - DNA, 21 bp, Artificial sequence
  SiRNA target sequence
gaaaattgtattgaatgctaa

SEQ ID NO: 306040 - DNA, 21 bp, Artificial sequence
  SiRNA target sequence
aaaattgtattgaatgctaat

SEQ ID NO: 306041 - DNA, 21 bp, Artificial sequence
  SiRNA target sequence
aaattgtattgaatgctaatc

SEQ ID NO: 306042 - DNA, 21 bp, Artificial sequence
  SiRNA target sequence
aattgtattgaatgctaatcc

SEQ ID NO: 306043 - DNA, 21 bp, Artificial sequence
  SiRNA target sequence
attgtattgaatgctaatcca

SEQ ID NO: 306044 - DNA, 21 bp, Artificial sequence
  SiRNA target sequence
ttgtattgaatgctaatccat

SEQ ID NO: 306045 - DNA, 21 bp, Artificial sequence
  SiRNA target sequence
tgtattgaatgctaatccatt

SEQ ID NO: 306046 - DNA, 21 bp, Artificial sequence
  SiRNA target sequence
gtattgaatgctaatccattc

SEQ ID NO: 306047 - DNA, 21 bp, Artificial sequence
  SiRNA target sequence
tattgaatgctaatccattca

SEQ ID NO: 306048 - DNA, 21 bp, Artificial sequence
  SiRNA target sequence
attgaatgctaatccattcat

SEQ ID NO: 306049 - DNA, 21 bp, Artificial sequence
  SiRNA target sequence
ttgaatgctaatccattcatt

SEQ ID NO: 306050 - DNA, 21 bp, Artificial sequence
  SiRNA target sequence
tgaatgctaatccattcattg

SEQ ID NO: 306051 - DNA, 21 bp, Artificial sequence
  SiRNA target sequence
gaatgctaatccattcattgc

SEQ ID NO: 306052 - DNA, 21 bp, Artificial sequence
  SiRNA target sequence
aatgctaatccattcattgct

SEQ ID NO: 306053 - DNA, 21 bp, Artificial sequence
  SiRNA target sequence
atgctaatccattcattgctg

SEQ ID NO: 306054 - DNA, 21 bp, Artificial sequence
  SiRNA target sequence
tgctaatccattcattgctgg

SEQ ID NO: 306055 - DNA, 21 bp, Artificial sequence
  SiRNA target sequence
gctaatccattcattgctggt

SEQ ID NO: 306056 - DNA, 21 bp, Artificial sequence
  SiRNA target sequence
ctaatccattcattgctggta

SEQ ID NO: 306057 - DNA, 21 bp, Artificial sequence
  SiRNA target sequence
taatccattcattgctggtag

SEQ ID NO: 306058 - DNA, 21 bp, Artificial sequence
  SiRNA target sequence
aatccattcattgctggtagg

SEQ ID NO: 306059 - DNA, 21 bp, Artificial sequence
  SiRNA target sequence
atccattcattgctggtaggt

SEQ ID NO: 306060 - DNA, 21 bp, Artificial sequence
  SiRNA target sequence
tccattcattgctggtaggtt

SEQ ID NO: 306061 - DNA, 21 bp, Artificial sequence
  SiRNA target sequence
ccattcattgctggtaggtta

SEQ ID NO: 306062 - DNA, 21 bp, Artificial sequence
  SiRNA target sequence
cattcattgctggtaggttat

SEQ ID NO: 306063 - DNA, 21 bp, Artificial sequence
  SiRNA target sequence
attcattgctggtaggttata

SEQ ID NO: 306064 - DNA, 21 bp, Artificial sequence
  SiRNA target sequence
ttcattgctggtaggttatac

SEQ ID NO: 306065 - DNA, 21 bp, Artificial sequence
  SiRNA target sequence
tcattgctggtaggttatacc

SEQ ID NO: 306066 - DNA, 21 bp, Artificial sequence
  SiRNA target sequence
cattgctggtaggttatacct

SEQ ID NO: 306067 - DNA, 21 bp, Artificial sequence
  SiRNA target sequence
attgctggtaggttataccta

SEQ ID NO: 306068 - DNA, 21 bp, Artificial sequence
  SiRNA target sequence
ttgctggtaggttatacctag

SEQ ID NO: 306069 - DNA, 21 bp, Artificial sequence
  SiRNA target sequence
tgctggtaggttatacctagc

SEQ ID NO: 306070 - DNA, 21 bp, Artificial sequence
  SiRNA target sequence
gctggtaggttatacctagca

SEQ ID NO: 306071 - DNA, 21 bp, Artificial sequence
  SiRNA target sequence
ctggtaggttatacctagcat

SEQ ID NO: 306072 - DNA, 21 bp, Artificial sequence
  SiRNA target sequence
tggtaggttatacctagcata

SEQ ID NO: 306073 - DNA, 21 bp, Artificial sequence
  SiRNA target sequence
ggtaggttatacctagcatat

SEQ ID NO: 306074 - DNA, 21 bp, Artificial sequence
  SiRNA target sequence
gtaggttatacctagcatatt

SEQ ID NO: 306075 - DNA, 21 bp, Artificial sequence
  SiRNA target sequence
taggttatacctagcatattc

SEQ ID NO: 306076 - DNA, 21 bp, Artificial sequence
  SiRNA target sequence
aggttatacctagcatattca

SEQ ID NO: 306077 - DNA, 21 bp, Artificial sequence
  SiRNA target sequence
ggttatacctagcatattcac

SEQ ID NO: 306078 - DNA, 21 bp, Artificial sequence
  SiRNA target sequence
gttatacctagcatattcacc

SEQ ID NO: 306079 - DNA, 21 bp, Artificial sequence
  SiRNA target sequence
ttatacctagcatattcacct

SEQ ID NO: 306080 - DNA, 21 bp, Artificial sequence
  SiRNA target sequence
tatacctagcatattcacctt

SEQ ID NO: 306081 - DNA, 21 bp, Artificial sequence
  SiRNA target sequence
atacctagcatattcacctta

SEQ ID NO: 306082 - DNA, 21 bp, Artificial sequence
  SiRNA target sequence
tacctagcatattcaccttat

SEQ ID NO: 306083 - DNA, 21 bp, Artificial sequence
  SiRNA target sequence
acctagcatattcaccttatg

SEQ ID NO: 306084 - DNA, 21 bp, Artificial sequence
  SiRNA target sequence
cctagcatattcaccttatga

SEQ ID NO: 306085 - DNA, 21 bp, Artificial sequence
  SiRNA target sequence
ctagcatattcaccttatgac

SEQ ID NO: 306086 - DNA, 21 bp, Artificial sequence
  SiRNA target sequence
tagcatattcaccttatgacg

SEQ ID NO: 306087 - DNA, 21 bp, Artificial sequence
  SiRNA target sequence
agcatattcaccttatgacga

SEQ ID NO: 306088 - DNA, 21 bp, Artificial sequence
  SiRNA target sequence
gcatattcaccttatgacgac

SEQ ID NO: 306089 - DNA, 21 bp, Artificial sequence
  SiRNA target sequence
catattcaccttatgacgaca

SEQ ID NO: 306090 - DNA, 21 bp, Artificial sequence
  SiRNA target sequence
atattcaccttatgacgacaa

SEQ ID NO: 306091 - DNA, 21 bp, Artificial sequence
  SiRNA target sequence
tattcaccttatgacgacaaa

SEQ ID NO: 306092 - DNA, 21 bp, Artificial sequence
  SiRNA target sequence
attcaccttatgacgacaaag

SEQ ID NO: 306093 - DNA, 21 bp, Artificial sequence
  SiRNA target sequence
ttcaccttatgacgacaaagt

SEQ ID NO: 306094 - DNA, 21 bp, Artificial sequence
  SiRNA target sequence
tcaccttatgacgacaaagta

SEQ ID NO: 306095 - DNA, 21 bp, Artificial sequence
  SiRNA target sequence
caccttatgacgacaaagtag

SEQ ID NO: 306096 - DNA, 21 bp, Artificial sequence
  SiRNA target sequence
accttatgacgacaaagtagc

SEQ ID NO: 306097 - DNA, 21 bp, Artificial sequence
  SiRNA target sequence
ccttatgacgacaaagtagca

SEQ ID NO: 306098 - DNA, 21 bp, Artificial sequence
  SiRNA target sequence
cttatgacgacaaagtagcac

SEQ ID NO: 306099 - DNA, 21 bp, Artificial sequence
  SiRNA target sequence
ttatgacgacaaagtagcacc

SEQ ID NO: 306100 - DNA, 21 bp, Artificial sequence
  SiRNA target sequence
tatgacgacaaagtagcacct

SEQ ID NO: 306101 - DNA, 21 bp, Artificial sequence
  SiRNA target sequence
atgacgacaaagtagcacctg

SEQ ID NO: 306102 - DNA, 21 bp, Artificial sequence
  SiRNA target sequence
tgacgacaaagtagcacctga

SEQ ID NO: 306103 - DNA, 21 bp, Artificial sequence
  SiRNA target sequence
gacgacaaagtagcacctgaa

SEQ ID NO: 306104 - DNA, 21 bp, Artificial sequence
  SiRNA target sequence
acgacaaagtagcacctgaac

SEQ ID NO: 306105 - DNA, 21 bp, Artificial sequence
  SiRNA target sequence
cgacaaagtagcacctgaacg

SEQ ID NO: 306106 - DNA, 21 bp, Artificial sequence
  SiRNA target sequence
gacaaagtagcacctgaacgt

SEQ ID NO: 306107 - DNA, 21 bp, Artificial sequence
  SiRNA target sequence
acaaagtagcacctgaacgta

SEQ ID NO: 306108 - DNA, 21 bp, Artificial sequence
  SiRNA target sequence
caaagtagcacctgaacgtag

SEQ ID NO: 306109 - DNA, 21 bp, Artificial sequence
  SiRNA target sequence
aaagtagcacctgaacgtaga

SEQ ID NO: 306110 - DNA, 21 bp, Artificial sequence
  SiRNA target sequence
aagtagcacctgaacgtagaa

SEQ ID NO: 306111 - DNA, 21 bp, Artificial sequence
  SiRNA target sequence
agtagcacctgaacgtagaat

SEQ ID NO: 306112 - DNA, 21 bp, Artificial sequence
  SiRNA target sequence
gtagcacctgaacgtagaatt

SEQ ID NO: 306113 - DNA, 21 bp, Artificial sequence
  SiRNA target sequence
tagcacctgaacgtagaatta

SEQ ID NO: 306114 - DNA, 21 bp, Artificial sequence
  SiRNA target sequence
agcacctgaacgtagaattat

SEQ ID NO: 306115 - DNA, 21 bp, Artificial sequence
  SiRNA target sequence
gcacctgaacgtagaattatt

SEQ ID NO: 306116 - DNA, 21 bp, Artificial sequence
  SiRNA target sequence
cacctgaacgtagaattattt

SEQ ID NO: 306117 - DNA, 21 bp, Artificial sequence
  SiRNA target sequence
acctgaacgtagaattattta

SEQ ID NO: 306118 - DNA, 21 bp, Artificial sequence
  SiRNA target sequence
cctgaacgtagaattatttat

SEQ ID NO: 306119 - DNA, 21 bp, Artificial sequence
  SiRNA target sequence
ctgaacgtagaattatttata

SEQ ID NO: 306120 - DNA, 21 bp, Artificial sequence
  SiRNA target sequence
tgaacgtagaattatttatac

SEQ ID NO: 306121 - DNA, 21 bp, Artificial sequence
  SiRNA target sequence
gaacgtagaattatttatact

SEQ ID NO: 306122 - DNA, 21 bp, Artificial sequence
  SiRNA target sequence
aacgtagaattatttatactt

SEQ ID NO: 306123 - DNA, 21 bp, Artificial sequence
  SiRNA target sequence
acgtagaattatttatacttc

SEQ ID NO: 306124 - DNA, 21 bp, Artificial sequence
  SiRNA target sequence
cgtagaattatttatacttcc

SEQ ID NO: 306125 - DNA, 21 bp, Artificial sequence
  SiRNA target sequence
gtagaattatttatacttccc

SEQ ID NO: 306126 - DNA, 21 bp, Artificial sequence
  SiRNA target sequence
tagaattatttatacttcccg

SEQ ID NO: 306127 - DNA, 21 bp, Artificial sequence
  SiRNA target sequence
agaattatttatacttcccgt

SEQ ID NO: 306128 - DNA, 21 bp, Artificial sequence
  SiRNA target sequence
gaattatttatacttcccgtg

SEQ ID NO: 306129 - DNA, 21 bp, Artificial sequence
  SiRNA target sequence
aattatttatacttcccgtgc

SEQ ID NO: 306130 - DNA, 21 bp, Artificial sequence
  SiRNA target sequence
attatttatacttcccgtgca

SEQ ID NO: 306131 - DNA, 21 bp, Artificial sequence
  SiRNA target sequence
ttatttatacttcccgtgcag

SEQ ID NO: 306132 - DNA, 21 bp, Artificial sequence
  SiRNA target sequence
tatttatacttcccgtgcagg

SEQ ID NO: 306133 - DNA, 21 bp, Artificial sequence
  SiRNA target sequence
atttatacttcccgtgcaggt

SEQ ID NO: 306134 - DNA, 21 bp, Artificial sequence
  SiRNA target sequence
tttatacttcccgtgcaggtg

SEQ ID NO: 306135 - DNA, 21 bp, Artificial sequence
  SiRNA target sequence
ttatacttcccgtgcaggtgt

SEQ ID NO: 306136 - DNA, 21 bp, Artificial sequence
  SiRNA target sequence
tatacttcccgtgcaggtgtt

SEQ ID NO: 306137 - DNA, 21 bp, Artificial sequence
  SiRNA target sequence
atacttcccgtgcaggtgtta

SEQ ID NO: 306138 - DNA, 21 bp, Artificial sequence
  SiRNA target sequence
tacttcccgtgcaggtgttac

SEQ ID NO: 306139 - DNA, 21 bp, Artificial sequence
  SiRNA target sequence
acttcccgtgcaggtgttaca

SEQ ID NO: 306140 - DNA, 21 bp, Artificial sequence
  SiRNA target sequence
cttcccgtgcaggtgttacag

SEQ ID NO: 306141 - DNA, 21 bp, Artificial sequence
  SiRNA target sequence
ttcccgtgcaggtgttacagg

SEQ ID NO: 306142 - DNA, 21 bp, Artificial sequence
  SiRNA target sequence
tcccgtgcaggtgttacaggt

SEQ ID NO: 306143 - DNA, 21 bp, Artificial sequence
  SiRNA target sequence
cccgtgcaggtgttacaggtt

SEQ ID NO: 306144 - DNA, 21 bp, Artificial sequence
  SiRNA target sequence
ccgtgcaggtgttacaggtta

SEQ ID NO: 306145 - DNA, 21 bp, Artificial sequence
  SiRNA target sequence
cgtgcaggtgttacaggttat

SEQ ID NO: 306146 - DNA, 21 bp, Artificial sequence
  SiRNA target sequence
gtgcaggtgttacaggttatc

SEQ ID NO: 306147 - DNA, 21 bp, Artificial sequence
  SiRNA target sequence
tgcaggtgttacaggttatcc

SEQ ID NO: 306148 - DNA, 21 bp, Artificial sequence
  SiRNA target sequence
gcaggtgttacaggttatccg

SEQ ID NO: 306149 - DNA, 21 bp, Artificial sequence
  SiRNA target sequence
caggtgttacaggttatccgg

SEQ ID NO: 306150 - DNA, 21 bp, Artificial sequence
  SiRNA target sequence
aggtgttacaggttatccggg

SEQ ID NO: 306151 - DNA, 21 bp, Artificial sequence
  SiRNA target sequence
ggtgttacaggttatccggga

SEQ ID NO: 306152 - DNA, 21 bp, Artificial sequence
  SiRNA target sequence
gtgttacaggttatccgggag

SEQ ID NO: 306153 - DNA, 21 bp, Artificial sequence
  SiRNA target sequence
tgttacaggttatccgggagt

SEQ ID NO: 306154 - DNA, 21 bp, Artificial sequence
  SiRNA target sequence
gttacaggttatccgggagtc

SEQ ID NO: 306155 - DNA, 21 bp, Artificial sequence
  SiRNA target sequence
ttacaggttatccgggagtcg

SEQ ID NO: 306156 - DNA, 21 bp, Artificial sequence
  SiRNA target sequence
tacaggttatccgggagtcga

SEQ ID NO: 306157 - DNA, 21 bp, Artificial sequence
  SiRNA target sequence
acaggttatccgggagtcgaa

SEQ ID NO: 306158 - DNA, 21 bp, Artificial sequence
  SiRNA target sequence
caggttatccgggagtcgaac

SEQ ID NO: 306159 - DNA, 21 bp, Artificial sequence
  SiRNA target sequence
aggttatccgggagtcgaact

SEQ ID NO: 306160 - DNA, 21 bp, Artificial sequence
  SiRNA target sequence
ggttatccgggagtcgaacta

SEQ ID NO: 306161 - DNA, 21 bp, Artificial sequence
  SiRNA target sequence
gttatccgggagtcgaactag

SEQ ID NO: 306162 - DNA, 21 bp, Artificial sequence
  SiRNA target sequence
ttatccgggagtcgaactaga

SEQ ID NO: 306163 - DNA, 21 bp, Artificial sequence
  SiRNA target sequence
tatccgggagtcgaactagat

SEQ ID NO: 306164 - DNA, 21 bp, Artificial sequence
  SiRNA target sequence
atccgggagtcgaactagatt

SEQ ID NO: 306165 - DNA, 21 bp, Artificial sequence
  SiRNA target sequence
tccgggagtcgaactagattt

SEQ ID NO: 306166 - DNA, 21 bp, Artificial sequence
  SiRNA target sequence
ccgggagtcgaactagatttc

SEQ ID NO: 306167 - DNA, 21 bp, Artificial sequence
  SiRNA target sequence
cgggagtcgaactagatttcc

SEQ ID NO: 306168 - DNA, 21 bp, Artificial sequence
  SiRNA target sequence
gggagtcgaactagatttcca

SEQ ID NO: 306169 - DNA, 21 bp, Artificial sequence
  SiRNA target sequence
ggagtcgaactagatttccaa

SEQ ID NO: 306170 - DNA, 21 bp, Artificial sequence
  SiRNA target sequence
gagtcgaactagatttccaat

SEQ ID NO: 306171 - DNA, 21 bp, Artificial sequence
  SiRNA target sequence
agtcgaactagatttccaatt

SEQ ID NO: 306172 - DNA, 21 bp, Artificial sequence
  SiRNA target sequence
gtcgaactagatttccaatta

SEQ ID NO: 306173 - DNA, 21 bp, Artificial sequence
  SiRNA target sequence
tcgaactagatttccaattag

SEQ ID NO: 306174 - DNA, 21 bp, Artificial sequence
  SiRNA target sequence
cgaactagatttccaattaga

SEQ ID NO: 306175 - DNA, 21 bp, Artificial sequence
  SiRNA target sequence
gaactagatttccaattagac

SEQ ID NO: 306176 - DNA, 21 bp, Artificial sequence
  SiRNA target sequence
aactagatttccaattagaca

SEQ ID NO: 306177 - DNA, 21 bp, Artificial sequence
  SiRNA target sequence
actagatttccaattagacaa

SEQ ID NO: 306178 - DNA, 21 bp, Artificial sequence
  SiRNA target sequence
ctagatttccaattagacaat

SEQ ID NO: 306179 - DNA, 21 bp, Artificial sequence
  SiRNA target sequence
tagatttccaattagacaatt

SEQ ID NO: 306180 - DNA, 21 bp, Artificial sequence
  SiRNA target sequence
agatttccaattagacaattc

SEQ ID NO: 306181 - DNA, 21 bp, Artificial sequence
  SiRNA target sequence
gatttccaattagacaattca

SEQ ID NO: 306182 - DNA, 21 bp, Artificial sequence
  SiRNA target sequence
atttccaattagacaattcag

SEQ ID NO: 306183 - DNA, 21 bp, Artificial sequence
  SiRNA target sequence
tttccaattagacaattcagt

SEQ ID NO: 306184 - DNA, 21 bp, Artificial sequence
  SiRNA target sequence
ttccaattagacaattcagtt

SEQ ID NO: 306185 - DNA, 21 bp, Artificial sequence
  SiRNA target sequence
tccaattagacaattcagttg

SEQ ID NO: 306186 - DNA, 21 bp, Artificial sequence
  SiRNA target sequence
ccaattagacaattcagttga

SEQ ID NO: 306187 - DNA, 21 bp, Artificial sequence
  SiRNA target sequence
caattagacaattcagttgag

SEQ ID NO: 306188 - DNA, 21 bp, Artificial sequence
  SiRNA target sequence
aattagacaattcagttgaga

SEQ ID NO: 306189 - DNA, 21 bp, Artificial sequence
  SiRNA target sequence
attagacaattcagttgagat

SEQ ID NO: 306190 - DNA, 21 bp, Artificial sequence
  SiRNA target sequence
ttagacaattcagttgagatg

SEQ ID NO: 306191 - DNA, 21 bp, Artificial sequence
  SiRNA target sequence
tagacaattcagttgagatga

SEQ ID NO: 306192 - DNA, 21 bp, Artificial sequence
  SiRNA target sequence
agacaattcagttgagatgac

SEQ ID NO: 306193 - DNA, 21 bp, Artificial sequence
  SiRNA target sequence
gacaattcagttgagatgact

SEQ ID NO: 306194 - DNA, 21 bp, Artificial sequence
  SiRNA target sequence
acaattcagttgagatgacta

SEQ ID NO: 306195 - DNA, 21 bp, Artificial sequence
  SiRNA target sequence
caattcagttgagatgactat

SEQ ID NO: 306196 - DNA, 21 bp, Artificial sequence
  SiRNA target sequence
aattcagttgagatgactatt

SEQ ID NO: 306197 - DNA, 21 bp, Artificial sequence
  SiRNA target sequence
attcagttgagatgactattc

SEQ ID NO: 306198 - DNA, 21 bp, Artificial sequence
  SiRNA target sequence
ttcagttgagatgactattcc

SEQ ID NO: 306199 - DNA, 21 bp, Artificial sequence
  SiRNA target sequence
tcagttgagatgactattcca

SEQ ID NO: 306200 - DNA, 21 bp, Artificial sequence
  SiRNA target sequence
cagttgagatgactattccat

SEQ ID NO: 306201 - DNA, 21 bp, Artificial sequence
  SiRNA target sequence
agttgagatgactattccata

SEQ ID NO: 306202 - DNA, 21 bp, Artificial sequence
  SiRNA target sequence
gttgagatgactattccatat

SEQ ID NO: 306203 - DNA, 21 bp, Artificial sequence
  SiRNA target sequence
ttgagatgactattccatatg

SEQ ID NO: 306204 - DNA, 21 bp, Artificial sequence
  SiRNA target sequence
tgagatgactattccatatgc

SEQ ID NO: 306205 - DNA, 21 bp, Artificial sequence
  SiRNA target sequence
gagatgactattccatatgca

SEQ ID NO: 306206 - DNA, 21 bp, Artificial sequence
  SiRNA target sequence
agatgactattccatatgcat

SEQ ID NO: 306207 - DNA, 21 bp, Artificial sequence
  SiRNA target sequence
gatgactattccatatgcatc

SEQ ID NO: 306208 - DNA, 21 bp, Artificial sequence
  SiRNA target sequence
atgactattccatatgcatct

SEQ ID NO: 306209 - DNA, 21 bp, Artificial sequence
  SiRNA target sequence
tgactattccatatgcatctt

SEQ ID NO: 306210 - DNA, 21 bp, Artificial sequence
  SiRNA target sequence
gactattccatatgcatcttt

SEQ ID NO: 306211 - DNA, 21 bp, Artificial sequence
  SiRNA target sequence
actattccatatgcatctttt

SEQ ID NO: 306212 - DNA, 21 bp, Artificial sequence
  SiRNA target sequence
ctattccatatgcatcttttc

SEQ ID NO: 306213 - DNA, 21 bp, Artificial sequence
  SiRNA target sequence
tattccatatgcatcttttca

SEQ ID NO: 306214 - DNA, 21 bp, Artificial sequence
  SiRNA target sequence
attccatatgcatcttttcaa

SEQ ID NO: 306215 - DNA, 21 bp, Artificial sequence
  SiRNA target sequence
ttccatatgcatcttttcaag

SEQ ID NO: 306216 - DNA, 21 bp, Artificial sequence
  SiRNA target sequence
tccatatgcatcttttcaaga

SEQ ID NO: 306217 - DNA, 21 bp, Artificial sequence
  SiRNA target sequence
ccatatgcatcttttcaagaa

SEQ ID NO: 306218 - DNA, 21 bp, Artificial sequence
  SiRNA target sequence
catatgcatcttttcaagaag

SEQ ID NO: 306219 - DNA, 21 bp, Artificial sequence
  SiRNA target sequence
atatgcatcttttcaagaagc

SEQ ID NO: 306220 - DNA, 21 bp, Artificial sequence
  SiRNA target sequence
tatgcatcttttcaagaagca

SEQ ID NO: 306221 - DNA, 21 bp, Artificial sequence
  SiRNA target sequence
atgcatcttttcaagaagcat

SEQ ID NO: 306222 - DNA, 21 bp, Artificial sequence
  SiRNA target sequence
tgcatcttttcaagaagcata

SEQ ID NO: 306223 - DNA, 21 bp, Artificial sequence
  SiRNA target sequence
gcatcttttcaagaagcatat

SEQ ID NO: 306224 - DNA, 21 bp, Artificial sequence
  SiRNA target sequence
catcttttcaagaagcatatg

SEQ ID NO: 306225 - DNA, 21 bp, Artificial sequence
  SiRNA target sequence
atcttttcaagaagcatatga

SEQ ID NO: 306226 - DNA, 21 bp, Artificial sequence
  SiRNA target sequence
tcttttcaagaagcatatgat

SEQ ID NO: 306227 - DNA, 21 bp, Artificial sequence
  SiRNA target sequence
cttttcaagaagcatatgatt

SEQ ID NO: 306228 - DNA, 21 bp, Artificial sequence
  SiRNA target sequence
ttttcaagaagcatatgattt

SEQ ID NO: 306229 - DNA, 21 bp, Artificial sequence
  SiRNA target sequence
tttcaagaagcatatgattta

SEQ ID NO: 306230 - DNA, 21 bp, Artificial sequence
  SiRNA target sequence
ttcaagaagcatatgatttag

SEQ ID NO: 306231 - DNA, 21 bp, Artificial sequence
  SiRNA target sequence
tcaagaagcatatgatttagt

SEQ ID NO: 306232 - DNA, 21 bp, Artificial sequence
  SiRNA target sequence
caagaagcatatgatttagtt

SEQ ID NO: 306233 - DNA, 21 bp, Artificial sequence
  SiRNA target sequence
aagaagcatatgatttagtta

SEQ ID NO: 306234 - DNA, 21 bp, Artificial sequence
  SiRNA target sequence
agaagcatatgatttagttag

SEQ ID NO: 306235 - DNA, 21 bp, Artificial sequence
  SiRNA target sequence
gaagcatatgatttagttagt

SEQ ID NO: 306236 - DNA, 21 bp, Artificial sequence
  SiRNA target sequence
aagcatatgatttagttagtg

SEQ ID NO: 306237 - DNA, 21 bp, Artificial sequence
  SiRNA target sequence
agcatatgatttagttagtgg

SEQ ID NO: 306238 - DNA, 21 bp, Artificial sequence
  SiRNA target sequence
gcatatgatttagttagtggg

SEQ ID NO: 306239 - DNA, 21 bp, Artificial sequence
  SiRNA target sequence
catatgatttagttagtggga

SEQ ID NO: 306240 - DNA, 21 bp, Artificial sequence
  SiRNA target sequence
atatgatttagttagtgggaa

SEQ ID NO: 306241 - DNA, 21 bp, Artificial sequence
  SiRNA target sequence
tatgatttagttagtgggaat

SEQ ID NO: 306242 - DNA, 21 bp, Artificial sequence
  SiRNA target sequence
atgatttagttagtgggaatg

SEQ ID NO: 306243 - DNA, 21 bp, Artificial sequence
  SiRNA target sequence
tgatttagttagtgggaatga

SEQ ID NO: 306244 - DNA, 21 bp, Artificial sequence
  SiRNA target sequence
gatttagttagtgggaatgaa

SEQ ID NO: 306245 - DNA, 21 bp, Artificial sequence
  SiRNA target sequence
atttagttagtgggaatgaag

SEQ ID NO: 306246 - DNA, 21 bp, Artificial sequence
  SiRNA target sequence
tttagttagtgggaatgaaga

SEQ ID NO: 306247 - DNA, 21 bp, Artificial sequence
  SiRNA target sequence
ttagttagtgggaatgaagat

SEQ ID NO: 306248 - DNA, 21 bp, Artificial sequence
  SiRNA target sequence
tagttagtgggaatgaagatt

SEQ ID NO: 306249 - DNA, 21 bp, Artificial sequence
  SiRNA target sequence
agttagtgggaatgaagattt

SEQ ID NO: 306250 - DNA, 21 bp, Artificial sequence
  SiRNA target sequence
gttagtgggaatgaagatttt

SEQ ID NO: 306251 - DNA, 21 bp, Artificial sequence
  SiRNA target sequence
ttagtgggaatgaagattttg

SEQ ID NO: 306252 - DNA, 21 bp, Artificial sequence
  SiRNA target sequence
tagtgggaatgaagattttgt

SEQ ID NO: 306253 - DNA, 21 bp, Artificial sequence
  SiRNA target sequence
agtgggaatgaagattttgtg

SEQ ID NO: 306254 - DNA, 21 bp, Artificial sequence
  SiRNA target sequence
gtgggaatgaagattttgtgc

SEQ ID NO: 306255 - DNA, 21 bp, Artificial sequence
  SiRNA target sequence
tgggaatgaagattttgtgca

SEQ ID NO: 306256 - DNA, 21 bp, Artificial sequence
  SiRNA target sequence
gggaatgaagattttgtgcag

SEQ ID NO: 306257 - DNA, 21 bp, Artificial sequence
  SiRNA target sequence
ggaatgaagattttgtgcagt

SEQ ID NO: 306258 - DNA, 21 bp, Artificial sequence
  SiRNA target sequence
gaatgaagattttgtgcagtt

SEQ ID NO: 306259 - DNA, 21 bp, Artificial sequence
  SiRNA target sequence
aatgaagattttgtgcagttg

SEQ ID NO: 306260 - DNA, 21 bp, Artificial sequence
  SiRNA target sequence
atgaagattttgtgcagttgt

SEQ ID NO: 306261 - DNA, 21 bp, Artificial sequence
  SiRNA target sequence
tgaagattttgtgcagttgta

SEQ ID NO: 306262 - DNA, 21 bp, Artificial sequence
  SiRNA target sequence
gaagattttgtgcagttgtac

SEQ ID NO: 306263 - DNA, 21 bp, Artificial sequence
  SiRNA target sequence
aagattttgtgcagttgtacc

SEQ ID NO: 306264 - DNA, 21 bp, Artificial sequence
  SiRNA target sequence
agattttgtgcagttgtacct

SEQ ID NO: 306265 - DNA, 21 bp, Artificial sequence
  SiRNA target sequence
gattttgtgcagttgtacctt

SEQ ID NO: 306266 - DNA, 21 bp, Artificial sequence
  SiRNA target sequence
attttgtgcagttgtaccttt

SEQ ID NO: 306267 - DNA, 21 bp, Artificial sequence
  SiRNA target sequence
ttttgtgcagttgtacctttt

SEQ ID NO: 306268 - DNA, 21 bp, Artificial sequence
  SiRNA target sequence
tttgtgcagttgtaccttttt

SEQ ID NO: 306269 - DNA, 21 bp, Artificial sequence
  SiRNA target sequence
ttgtgcagttgtaccttttta

SEQ ID NO: 306270 - DNA, 21 bp, Artificial sequence
  SiRNA target sequence
tgtgcagttgtacctttttac

SEQ ID NO: 306271 - DNA, 21 bp, Artificial sequence
  SiRNA target sequence
gtgcagttgtacctttttaca

SEQ ID NO: 306272 - DNA, 21 bp, Artificial sequence
  SiRNA target sequence
tgcagttgtacctttttacaa

SEQ ID NO: 306273 - DNA, 21 bp, Artificial sequence
  SiRNA target sequence
gcagttgtacctttttacaat

SEQ ID NO: 306274 - DNA, 21 bp, Artificial sequence
  SiRNA target sequence
cagttgtacctttttacaatt

SEQ ID NO: 306275 - DNA, 21 bp, Artificial sequence
  SiRNA target sequence
agttgtacctttttacaattg

SEQ ID NO: 306276 - DNA, 21 bp, Artificial sequence
  SiRNA target sequence
gttgtacctttttacaattgc

SEQ ID NO: 306277 - DNA, 21 bp, Artificial sequence
  SiRNA target sequence
ttgtacctttttacaattgca

SEQ ID NO: 306278 - DNA, 21 bp, Artificial sequence
  SiRNA target sequence
tgtacctttttacaattgcac

SEQ ID NO: 306279 - DNA, 21 bp, Artificial sequence
  SiRNA target sequence
gtacctttttacaattgcacc

SEQ ID NO: 306280 - DNA, 21 bp, Artificial sequence
  SiRNA target sequence
tacctttttacaattgcaccg

SEQ ID NO: 306281 - DNA, 21 bp, Artificial sequence
  SiRNA target sequence
acctttttacaattgcaccgg

SEQ ID NO: 306282 - DNA, 21 bp, Artificial sequence
  SiRNA target sequence
cctttttacaattgcaccggt

SEQ ID NO: 306283 - DNA, 21 bp, Artificial sequence
  SiRNA target sequence
ctttttacaattgcaccggtt

SEQ ID NO: 306284 - DNA, 21 bp, Artificial sequence
  SiRNA target sequence
tttttacaattgcaccggttt

SEQ ID NO: 306285 - DNA, 21 bp, Artificial sequence
  SiRNA target sequence
ttttacaattgcaccggtttt

SEQ ID NO: 306286 - DNA, 21 bp, Artificial sequence
  SiRNA target sequence
tttacaattgcaccggttttg

SEQ ID NO: 306287 - DNA, 21 bp, Artificial sequence
  SiRNA target sequence
ttacaattgcaccggttttgg

SEQ ID NO: 306288 - DNA, 21 bp, Artificial sequence
  SiRNA target sequence
tacaattgcaccggttttggg

SEQ ID NO: 306289 - DNA, 21 bp, Artificial sequence
  SiRNA target sequence
acaattgcaccggttttggga

SEQ ID NO: 306290 - DNA, 21 bp, Artificial sequence
  SiRNA target sequence
caattgcaccggttttgggac

SEQ ID NO: 306291 - DNA, 21 bp, Artificial sequence
  SiRNA target sequence
aattgcaccggttttgggacc

SEQ ID NO: 306292 - DNA, 21 bp, Artificial sequence
  SiRNA target sequence
attgcaccggttttgggacct

SEQ ID NO: 306293 - DNA, 21 bp, Artificial sequence
  SiRNA target sequence
ttgcaccggttttgggacctt

SEQ ID NO: 306294 - DNA, 21 bp, Artificial sequence
  SiRNA target sequence
tgcaccggttttgggaccttc

SEQ ID NO: 306295 - DNA, 21 bp, Artificial sequence
  SiRNA target sequence
gcaccggttttgggaccttca

SEQ ID NO: 306296 - DNA, 21 bp, Artificial sequence
  SiRNA target sequence
caccggttttgggaccttcag

SEQ ID NO: 306297 - DNA, 21 bp, Artificial sequence
  SiRNA target sequence
accggttttgggaccttcagc

SEQ ID NO: 306298 - DNA, 21 bp, Artificial sequence
  SiRNA target sequence
ccggttttgggaccttcagct

SEQ ID NO: 306299 - DNA, 21 bp, Artificial sequence
  SiRNA target sequence
cggttttgggaccttcagctg

SEQ ID NO: 306300 - DNA, 21 bp, Artificial sequence
  SiRNA target sequence
ggttttgggaccttcagctga

SEQ ID NO: 306301 - DNA, 21 bp, Artificial sequence
  SiRNA target sequence
gttttgggaccttcagctgaa

SEQ ID NO: 306302 - DNA, 21 bp, Artificial sequence
  SiRNA target sequence
ttttgggaccttcagctgaat

SEQ ID NO: 306303 - DNA, 21 bp, Artificial sequence
  SiRNA target sequence
tttgggaccttcagctgaatc

SEQ ID NO: 306304 - DNA, 21 bp, Artificial sequence
  SiRNA target sequence
ttgggaccttcagctgaatca

SEQ ID NO: 306305 - DNA, 21 bp, Artificial sequence
  SiRNA target sequence
tgggaccttcagctgaatcag

SEQ ID NO: 306306 - DNA, 21 bp, Artificial sequence
  SiRNA target sequence
gggaccttcagctgaatcagc

SEQ ID NO: 306307 - DNA, 21 bp, Artificial sequence
  SiRNA target sequence
ggaccttcagctgaatcagcg

SEQ ID NO: 306308 - DNA, 21 bp, Artificial sequence
  SiRNA target sequence
gaccttcagctgaatcagcga

SEQ ID NO: 306309 - DNA, 21 bp, Artificial sequence
  SiRNA target sequence
accttcagctgaatcagcgaa

SEQ ID NO: 306310 - DNA, 21 bp, Artificial sequence
  SiRNA target sequence
ccttcagctgaatcagcgaat

SEQ ID NO: 306311 - DNA, 21 bp, Artificial sequence
  SiRNA target sequence
cttcagctgaatcagcgaatt

SEQ ID NO: 306312 - DNA, 21 bp, Artificial sequence
  SiRNA target sequence
ttcagctgaatcagcgaattc

SEQ ID NO: 306313 - DNA, 21 bp, Artificial sequence
  SiRNA target sequence
tcagctgaatcagcgaattca

SEQ ID NO: 306314 - DNA, 21 bp, Artificial sequence
  SiRNA target sequence
cagctgaatcagcgaattcaa

SEQ ID NO: 306315 - DNA, 21 bp, Artificial sequence
  SiRNA target sequence
agctgaatcagcgaattcaaa

SEQ ID NO: 306316 - DNA, 21 bp, Artificial sequence
  SiRNA target sequence
gctgaatcagcgaattcaaaa

SEQ ID NO: 306317 - DNA, 21 bp, Artificial sequence
  SiRNA target sequence
ctgaatcagcgaattcaaaag

SEQ ID NO: 306318 - DNA, 21 bp, Artificial sequence
  SiRNA target sequence
tgaatcagcgaattcaaaagt

SEQ ID NO: 306319 - DNA, 21 bp, Artificial sequence
  SiRNA target sequence
gaatcagcgaattcaaaagta

SEQ ID NO: 306320 - DNA, 21 bp, Artificial sequence
  SiRNA target sequence
aatcagcgaattcaaaagtag

SEQ ID NO: 306321 - DNA, 21 bp, Artificial sequence
  SiRNA target sequence
atcagcgaattcaaaagtaga

SEQ ID NO: 306322 - DNA, 21 bp, Artificial sequence
  SiRNA target sequence
tcagcgaattcaaaagtagac

SEQ ID NO: 306323 - DNA, 21 bp, Artificial sequence
  SiRNA target sequence
cagcgaattcaaaagtagacc

SEQ ID NO: 306324 - DNA, 21 bp, Artificial sequence
  SiRNA target sequence
agcgaattcaaaagtagacct

SEQ ID NO: 306325 - DNA, 21 bp, Artificial sequence
  SiRNA target sequence
gcgaattcaaaagtagacctt

SEQ ID NO: 306326 - DNA, 21 bp, Artificial sequence
  SiRNA target sequence
cgaattcaaaagtagaccttt

SEQ ID NO: 306327 - DNA, 21 bp, Artificial sequence
  SiRNA target sequence
gaattcaaaagtagacctttc

SEQ ID NO: 306328 - DNA, 21 bp, Artificial sequence
  SiRNA target sequence
aattcaaaagtagacctttca

SEQ ID NO: 306329 - DNA, 21 bp, Artificial sequence
  SiRNA target sequence
attcaaaagtagacctttcag

SEQ ID NO: 306330 - DNA, 21 bp, Artificial sequence
  SiRNA target sequence
ttcaaaagtagacctttcagt

SEQ ID NO: 306331 - DNA, 21 bp, Artificial sequence
  SiRNA target sequence
tcaaaagtagacctttcagtc

SEQ ID NO: 306332 - DNA, 21 bp, Artificial sequence
  SiRNA target sequence
caaaagtagacctttcagtct

SEQ ID NO: 306333 - DNA, 21 bp, Artificial sequence
  SiRNA target sequence
aaaagtagacctttcagtcta

SEQ ID NO: 306334 - DNA, 21 bp, Artificial sequence
  SiRNA target sequence
aaagtagacctttcagtctat

SEQ ID NO: 306335 - DNA, 21 bp, Artificial sequence
  SiRNA target sequence
aagtagacctttcagtctata

SEQ ID NO: 306336 - DNA, 21 bp, Artificial sequence
  SiRNA target sequence
agtagacctttcagtctatat

SEQ ID NO: 306337 - DNA, 21 bp, Artificial sequence
  SiRNA target sequence
gtagacctttcagtctatatg

SEQ ID NO: 306338 - DNA, 21 bp, Artificial sequence
  SiRNA target sequence
tagacctttcagtctatatgt

SEQ ID NO: 306339 - DNA, 21 bp, Artificial sequence
  SiRNA target sequence
agacctttcagtctatatgtg

SEQ ID NO: 306340 - DNA, 21 bp, Artificial sequence
  SiRNA target sequence
gacctttcagtctatatgtgg

SEQ ID NO: 306341 - DNA, 21 bp, Artificial sequence
  SiRNA target sequence
acctttcagtctatatgtggt

SEQ ID NO: 306342 - DNA, 21 bp, Artificial sequence
  SiRNA target sequence
cctttcagtctatatgtggtt

SEQ ID NO: 306343 - DNA, 21 bp, Artificial sequence
  SiRNA target sequence
ctttcagtctatatgtggtta

SEQ ID NO: 306344 - DNA, 21 bp, Artificial sequence
  SiRNA target sequence
tttcagtctatatgtggttag

SEQ ID NO: 306345 - DNA, 21 bp, Artificial sequence
  SiRNA target sequence
ttcagtctatatgtggttaga

SEQ ID NO: 306346 - DNA, 21 bp, Artificial sequence
  SiRNA target sequence
tcagtctatatgtggttagat

SEQ ID NO: 306347 - DNA, 21 bp, Artificial sequence
  SiRNA target sequence
cagtctatatgtggttagata

SEQ ID NO: 306348 - DNA, 21 bp, Artificial sequence
  SiRNA target sequence
agtctatatgtggttagataa

SEQ ID NO: 306349 - DNA, 21 bp, Artificial sequence
  SiRNA target sequence
gtctatatgtggttagataac

SEQ ID NO: 306350 - DNA, 21 bp, Artificial sequence
  SiRNA target sequence
tctatatgtggttagataaca

SEQ ID NO: 306351 - DNA, 21 bp, Artificial sequence
  SiRNA target sequence
ctatatgtggttagataacat

SEQ ID NO: 306352 - DNA, 21 bp, Artificial sequence
  SiRNA target sequence
tatatgtggttagataacata

SEQ ID NO: 306353 - DNA, 21 bp, Artificial sequence
  SiRNA target sequence
atatgtggttagataacatat

SEQ ID NO: 306354 - DNA, 21 bp, Artificial sequence
  SiRNA target sequence
tatgtggttagataacatatc

SEQ ID NO: 306355 - DNA, 21 bp, Artificial sequence
  SiRNA target sequence
atgtggttagataacatatct

SEQ ID NO: 306356 - DNA, 21 bp, Artificial sequence
  SiRNA target sequence
tgtggttagataacatatctc

SEQ ID NO: 306357 - DNA, 21 bp, Artificial sequence
  SiRNA target sequence
gtggttagataacatatctct

SEQ ID NO: 306358 - DNA, 21 bp, Artificial sequence
  SiRNA target sequence
tggttagataacatatctctc

SEQ ID NO: 306359 - DNA, 21 bp, Artificial sequence
  SiRNA target sequence
ggttagataacatatctctcg

SEQ ID NO: 306360 - DNA, 21 bp, Artificial sequence
  SiRNA target sequence
gttagataacatatctctcgt

SEQ ID NO: 306361 - DNA, 21 bp, Artificial sequence
  SiRNA target sequence
ttagataacatatctctcgtt

SEQ ID NO: 306362 - DNA, 21 bp, Artificial sequence
  SiRNA target sequence
tagataacatatctctcgtta

SEQ ID NO: 306363 - DNA, 21 bp, Artificial sequence
  SiRNA target sequence
agataacatatctctcgttat

SEQ ID NO: 306364 - DNA, 21 bp, Artificial sequence
  SiRNA target sequence
gataacatatctctcgttatc

SEQ ID NO: 306365 - DNA, 21 bp, Artificial sequence
  SiRNA target sequence
ataacatatctctcgttatcc

SEQ ID NO: 306366 - DNA, 21 bp, Artificial sequence
  SiRNA target sequence
taacatatctctcgttatccc

SEQ ID NO: 306367 - DNA, 21 bp, Artificial sequence
  SiRNA target sequence
aacatatctctcgttatcccc

SEQ ID NO: 306368 - DNA, 21 bp, Artificial sequence
  SiRNA target sequence
acatatctctcgttatcccca

SEQ ID NO: 306369 - DNA, 21 bp, Artificial sequence
  SiRNA target sequence
catatctctcgttatccccac

SEQ ID NO: 306370 - DNA, 21 bp, Artificial sequence
  SiRNA target sequence
atatctctcgttatccccaca

SEQ ID NO: 306371 - DNA, 21 bp, Artificial sequence
  SiRNA target sequence
tatctctcgttatccccacat

SEQ ID NO: 306372 - DNA, 21 bp, Artificial sequence
  SiRNA target sequence
atctctcgttatccccacata

SEQ ID NO: 306373 - DNA, 21 bp, Artificial sequence
  SiRNA target sequence
tctctcgttatccccacatat

SEQ ID NO: 306374 - DNA, 21 bp, Artificial sequence
  SiRNA target sequence
ctctcgttatccccacatata

SEQ ID NO: 306375 - DNA, 21 bp, Artificial sequence
  SiRNA target sequence
tctcgttatccccacatatag

SEQ ID NO: 306376 - DNA, 21 bp, Artificial sequence
  SiRNA target sequence
ctcgttatccccacatataga

SEQ ID NO: 306377 - DNA, 21 bp, Artificial sequence
  SiRNA target sequence
tcgttatccccacatatagat

SEQ ID NO: 306378 - DNA, 21 bp, Artificial sequence
  SiRNA target sequence
cgttatccccacatatagatt

SEQ ID NO: 306379 - DNA, 21 bp, Artificial sequence
  SiRNA target sequence
gttatccccacatatagattg

SEQ ID NO: 306380 - DNA, 21 bp, Artificial sequence
  SiRNA target sequence
ttatccccacatatagattga

SEQ ID NO: 306381 - DNA, 21 bp, Artificial sequence
  SiRNA target sequence
tatccccacatatagattgaa

SEQ ID NO: 306382 - DNA, 21 bp, Artificial sequence
  SiRNA target sequence
atccccacatatagattgaat

SEQ ID NO: 306383 - DNA, 21 bp, Artificial sequence
  SiRNA target sequence
tccccacatatagattgaatc

SEQ ID NO: 306384 - DNA, 21 bp, Artificial sequence
  SiRNA target sequence
ccccacatatagattgaatcc

SEQ ID NO: 306385 - DNA, 21 bp, Artificial sequence
  SiRNA target sequence
cccacatatagattgaatcca

SEQ ID NO: 306386 - DNA, 21 bp, Artificial sequence
  SiRNA target sequence
ccacatatagattgaatccaa

SEQ ID NO: 306387 - DNA, 21 bp, Artificial sequence
  SiRNA target sequence
cacatatagattgaatccaaa

SEQ ID NO: 306388 - DNA, 21 bp, Artificial sequence
  SiRNA target sequence
acatatagattgaatccaaat

SEQ ID NO: 306389 - DNA, 21 bp, Artificial sequence
  SiRNA target sequence
catatagattgaatccaaatc

SEQ ID NO: 306390 - DNA, 21 bp, Artificial sequence
  SiRNA target sequence
atatagattgaatccaaatct

SEQ ID NO: 306391 - DNA, 21 bp, Artificial sequence
  SiRNA target sequence
tatagattgaatccaaatctt

SEQ ID NO: 306392 - DNA, 21 bp, Artificial sequence
  SiRNA target sequence
atagattgaatccaaatcttc

SEQ ID NO: 306393 - DNA, 21 bp, Artificial sequence
  SiRNA target sequence
tagattgaatccaaatcttcc

SEQ ID NO: 306394 - DNA, 21 bp, Artificial sequence
  SiRNA target sequence
agattgaatccaaatcttcca

SEQ ID NO: 306395 - DNA, 21 bp, Artificial sequence
  SiRNA target sequence
gattgaatccaaatcttccaa

SEQ ID NO: 306396 - DNA, 21 bp, Artificial sequence
  SiRNA target sequence
attgaatccaaatcttccaac

SEQ ID NO: 306397 - DNA, 21 bp, Artificial sequence
  SiRNA target sequence
ttgaatccaaatcttccaacc

SEQ ID NO: 306398 - DNA, 21 bp, Artificial sequence
  SiRNA target sequence
tgaatccaaatcttccaaccg

SEQ ID NO: 306399 - DNA, 21 bp, Artificial sequence
  SiRNA target sequence
gaatccaaatcttccaaccgg

SEQ ID NO: 306400 - DNA, 21 bp, Artificial sequence
  SiRNA target sequence
aatccaaatcttccaaccgga

SEQ ID NO: 306401 - DNA, 21 bp, Artificial sequence
  SiRNA target sequence
atccaaatcttccaaccggac

SEQ ID NO: 306402 - DNA, 21 bp, Artificial sequence
  SiRNA target sequence
tccaaatcttccaaccggaca

SEQ ID NO: 306403 - DNA, 21 bp, Artificial sequence
  SiRNA target sequence
ccaaatcttccaaccggacaa

SEQ ID NO: 306404 - DNA, 21 bp, Artificial sequence
  SiRNA target sequence
caaatcttccaaccggacaaa

SEQ ID NO: 306405 - DNA, 21 bp, Artificial sequence
  SiRNA target sequence
aaatcttccaaccggacaaac

SEQ ID NO: 306406 - DNA, 21 bp, Artificial sequence
  SiRNA target sequence
aatcttccaaccggacaaact

SEQ ID NO: 306407 - DNA, 21 bp, Artificial sequence
  SiRNA target sequence
atcttccaaccggacaaactc

SEQ ID NO: 306408 - DNA, 21 bp, Artificial sequence
  SiRNA target sequence
tcttccaaccggacaaactct

SEQ ID NO: 306409 - DNA, 21 bp, Artificial sequence
  SiRNA target sequence
cttccaaccggacaaactcta

SEQ ID NO: 306410 - DNA, 21 bp, Artificial sequence
  SiRNA target sequence
ttccaaccggacaaactctaa

SEQ ID NO: 306411 - DNA, 21 bp, Artificial sequence
  SiRNA target sequence
tccaaccggacaaactctaac

SEQ ID NO: 306412 - DNA, 21 bp, Artificial sequence
  SiRNA target sequence
ccaaccggacaaactctaacc

SEQ ID NO: 306413 - DNA, 21 bp, Artificial sequence
  SiRNA target sequence
caaccggacaaactctaaccc

SEQ ID NO: 306414 - DNA, 21 bp, Artificial sequence
  SiRNA target sequence
aaccggacaaactctaacccg

SEQ ID NO: 306415 - DNA, 21 bp, Artificial sequence
  SiRNA target sequence
accggacaaactctaacccgc

SEQ ID NO: 306416 - DNA, 21 bp, Artificial sequence
  SiRNA target sequence
ccggacaaactctaacccgca

SEQ ID NO: 306417 - DNA, 21 bp, Artificial sequence
  SiRNA target sequence
cggacaaactctaacccgcat

SEQ ID NO: 306418 - DNA, 21 bp, Artificial sequence
  SiRNA target sequence
ggacaaactctaacccgcata

SEQ ID NO: 306419 - DNA, 21 bp, Artificial sequence
  SiRNA target sequence
gacaaactctaacccgcatag

SEQ ID NO: 306420 - DNA, 21 bp, Artificial sequence
  SiRNA target sequence
acaaactctaacccgcatagt

SEQ ID NO: 306421 - DNA, 21 bp, Artificial sequence
  SiRNA target sequence
caaactctaacccgcatagtt

SEQ ID NO: 306422 - DNA, 21 bp, Artificial sequence
  SiRNA target sequence
aaactctaacccgcatagttc

SEQ ID NO: 306423 - DNA, 21 bp, Artificial sequence
  SiRNA target sequence
aactctaacccgcatagttca

SEQ ID NO: 306424 - DNA, 21 bp, Artificial sequence
  SiRNA target sequence
actctaacccgcatagttcag

SEQ ID NO: 306425 - DNA, 21 bp, Artificial sequence
  SiRNA target sequence
ctctaacccgcatagttcaga

SEQ ID NO: 306426 - DNA, 21 bp, Artificial sequence
  SiRNA target sequence
tctaacccgcatagttcagaa

SEQ ID NO: 306427 - DNA, 21 bp, Artificial sequence
  SiRNA target sequence
ctaacccgcatagttcagaat

SEQ ID NO: 306428 - DNA, 21 bp, Artificial sequence
  SiRNA target sequence
taacccgcatagttcagaatt

SEQ ID NO: 306429 - DNA, 21 bp, Artificial sequence
  SiRNA target sequence
aacccgcatagttcagaattc

SEQ ID NO: 306430 - DNA, 21 bp, Artificial sequence
  SiRNA target sequence
acccgcatagttcagaattcc

SEQ ID NO: 306431 - DNA, 21 bp, Artificial sequence
  SiRNA target sequence
cccgcatagttcagaattccg

SEQ ID NO: 306432 - DNA, 21 bp, Artificial sequence
  SiRNA target sequence
ccgcatagttcagaattccga

SEQ ID NO: 306433 - DNA, 21 bp, Artificial sequence
  SiRNA target sequence
cgcatagttcagaattccgat

SEQ ID NO: 306434 - DNA, 21 bp, Artificial sequence
  SiRNA target sequence
gcatagttcagaattccgatt

SEQ ID NO: 306435 - DNA, 21 bp, Artificial sequence
  SiRNA target sequence
catagttcagaattccgattc

SEQ ID NO: 306436 - DNA, 21 bp, Artificial sequence
  SiRNA target sequence
atagttcagaattccgattct

SEQ ID NO: 306437 - DNA, 21 bp, Artificial sequence
  SiRNA target sequence
tagttcagaattccgattctg

SEQ ID NO: 306438 - DNA, 21 bp, Artificial sequence
  SiRNA target sequence
agttcagaattccgattctga

SEQ ID NO: 306439 - DNA, 21 bp, Artificial sequence
  SiRNA target sequence
gttcagaattccgattctgat

SEQ ID NO: 306440 - DNA, 21 bp, Artificial sequence
  SiRNA target sequence
ttcagaattccgattctgata

SEQ ID NO: 306441 - DNA, 21 bp, Artificial sequence
  SiRNA target sequence
tcagaattccgattctgataa

SEQ ID NO: 306442 - DNA, 21 bp, Artificial sequence
  SiRNA target sequence
cagaattccgattctgataaa

SEQ ID NO: 306443 - DNA, 21 bp, Artificial sequence
  SiRNA target sequence
agaattccgattctgataaac

SEQ ID NO: 306444 - DNA, 21 bp, Artificial sequence
  SiRNA target sequence
gaattccgattctgataaact

SEQ ID NO: 306445 - DNA, 21 bp, Artificial sequence
  SiRNA target sequence
aattccgattctgataaactc

SEQ ID NO: 306446 - DNA, 21 bp, Artificial sequence
  SiRNA target sequence
attccgattctgataaactca

SEQ ID NO: 306447 - DNA, 21 bp, Artificial sequence
  SiRNA target sequence
ttccgattctgataaactcaa

SEQ ID NO: 306448 - DNA, 21 bp, Artificial sequence
  SiRNA target sequence
tccgattctgataaactcaaa

SEQ ID NO: 306449 - DNA, 21 bp, Artificial sequence
  SiRNA target sequence
ccgattctgataaactcaaag

SEQ ID NO: 306450 - DNA, 21 bp, Artificial sequence
  SiRNA target sequence
cgattctgataaactcaaaga

SEQ ID NO: 306451 - DNA, 21 bp, Artificial sequence
  SiRNA target sequence
gattctgataaactcaaagaa

SEQ ID NO: 306452 - DNA, 21 bp, Artificial sequence
  SiRNA target sequence
attctgataaactcaaagaag

SEQ ID NO: 306453 - DNA, 21 bp, Artificial sequence
  SiRNA target sequence
ttctgataaactcaaagaagc

SEQ ID NO: 306454 - DNA, 21 bp, Artificial sequence
  SiRNA target sequence
tctgataaactcaaagaagca

SEQ ID NO: 306455 - DNA, 21 bp, Artificial sequence
  SiRNA target sequence
ctgataaactcaaagaagcac

SEQ ID NO: 306456 - DNA, 21 bp, Artificial sequence
  SiRNA target sequence
tgataaactcaaagaagcact

SEQ ID NO: 306457 - DNA, 21 bp, Artificial sequence
  SiRNA target sequence
gataaactcaaagaagcactt

SEQ ID NO: 306458 - DNA, 21 bp, Artificial sequence
  SiRNA target sequence
ataaactcaaagaagcactta

SEQ ID NO: 306459 - DNA, 21 bp, Artificial sequence
  SiRNA target sequence
taaactcaaagaagcacttaa

SEQ ID NO: 306460 - DNA, 21 bp, Artificial sequence
  SiRNA target sequence
aaactcaaagaagcacttaag

SEQ ID NO: 306461 - DNA, 21 bp, Artificial sequence
  SiRNA target sequence
aactcaaagaagcacttaaga

SEQ ID NO: 306462 - DNA, 21 bp, Artificial sequence
  SiRNA target sequence
actcaaagaagcacttaagat

SEQ ID NO: 306463 - DNA, 21 bp, Artificial sequence
  SiRNA target sequence
ctcaaagaagcacttaagatt

SEQ ID NO: 306464 - DNA, 21 bp, Artificial sequence
  SiRNA target sequence
tcaaagaagcacttaagattg

SEQ ID NO: 306465 - DNA, 21 bp, Artificial sequence
  SiRNA target sequence
caaagaagcacttaagattgc

SEQ ID NO: 306466 - DNA, 21 bp, Artificial sequence
  SiRNA target sequence
aaagaagcacttaagattgct

SEQ ID NO: 306467 - DNA, 21 bp, Artificial sequence
  SiRNA target sequence
aagaagcacttaagattgcta

SEQ ID NO: 306468 - DNA, 21 bp, Artificial sequence
  SiRNA target sequence
agaagcacttaagattgctaa

SEQ ID NO: 306469 - DNA, 21 bp, Artificial sequence
  SiRNA target sequence
gaagcacttaagattgctaag

SEQ ID NO: 306470 - DNA, 21 bp, Artificial sequence
  SiRNA target sequence
aagcacttaagattgctaagt

SEQ ID NO: 306471 - DNA, 21 bp, Artificial sequence
  SiRNA target sequence
agcacttaagattgctaagtc

SEQ ID NO: 306472 - DNA, 21 bp, Artificial sequence
  SiRNA target sequence
gcacttaagattgctaagtct

SEQ ID NO: 306473 - DNA, 21 bp, Artificial sequence
  SiRNA target sequence
cacttaagattgctaagtcta

SEQ ID NO: 306474 - DNA, 21 bp, Artificial sequence
  SiRNA target sequence
acttaagattgctaagtctaa

SEQ ID NO: 306475 - DNA, 21 bp, Artificial sequence
  SiRNA target sequence
cttaagattgctaagtctaag

SEQ ID NO: 306476 - DNA, 21 bp, Artificial sequence
  SiRNA target sequence
ttaagattgctaagtctaaga

SEQ ID NO: 306477 - DNA, 21 bp, Artificial sequence
  SiRNA target sequence
taagattgctaagtctaagaa

SEQ ID NO: 306478 - DNA, 21 bp, Artificial sequence
  SiRNA target sequence
aagattgctaagtctaagaac

SEQ ID NO: 306479 - DNA, 21 bp, Artificial sequence
  SiRNA target sequence
agattgctaagtctaagaacc

SEQ ID NO: 306480 - DNA, 21 bp, Artificial sequence
  SiRNA target sequence
gattgctaagtctaagaaccc

SEQ ID NO: 306481 - DNA, 21 bp, Artificial sequence
  SiRNA target sequence
attgctaagtctaagaaccct

SEQ ID NO: 306482 - DNA, 21 bp, Artificial sequence
  SiRNA target sequence
ttgctaagtctaagaaccctt

SEQ ID NO: 306483 - DNA, 21 bp, Artificial sequence
  SiRNA target sequence
tgctaagtctaagaacccttc

SEQ ID NO: 306484 - DNA, 21 bp, Artificial sequence
  SiRNA target sequence
gctaagtctaagaacccttca

SEQ ID NO: 306485 - DNA, 21 bp, Artificial sequence
  SiRNA target sequence
ctaagtctaagaacccttcag

SEQ ID NO: 306486 - DNA, 21 bp, Artificial sequence
  SiRNA target sequence
taagtctaagaacccttcagg

SEQ ID NO: 306487 - DNA, 21 bp, Artificial sequence
  SiRNA target sequence
aagtctaagaacccttcagga

SEQ ID NO: 306488 - DNA, 21 bp, Artificial sequence
  SiRNA target sequence
agtctaagaacccttcaggat

SEQ ID NO: 306489 - DNA, 21 bp, Artificial sequence
  SiRNA target sequence
gtctaagaacccttcaggata

SEQ ID NO: 306490 - DNA, 21 bp, Artificial sequence
  SiRNA target sequence
tctaagaacccttcaggatat

SEQ ID NO: 306491 - DNA, 21 bp, Artificial sequence
  SiRNA target sequence
ctaagaacccttcaggatata

SEQ ID NO: 306492 - DNA, 21 bp, Artificial sequence
  SiRNA target sequence
taagaacccttcaggatataa

SEQ ID NO: 306493 - DNA, 21 bp, Artificial sequence
  SiRNA target sequence
aagaacccttcaggatataaa

SEQ ID NO: 306494 - DNA, 21 bp, Artificial sequence
  SiRNA target sequence
agaacccttcaggatataaat

SEQ ID NO: 306495 - DNA, 21 bp, Artificial sequence
  SiRNA target sequence
gaacccttcaggatataaata

SEQ ID NO: 306496 - DNA, 21 bp, Artificial sequence
  SiRNA target sequence
aacccttcaggatataaatat

SEQ ID NO: 306497 - DNA, 21 bp, Artificial sequence
  SiRNA target sequence
acccttcaggatataaatata

SEQ ID NO: 306498 - DNA, 21 bp, Artificial sequence
  SiRNA target sequence
cccttcaggatataaatatat

SEQ ID NO: 306499 - DNA, 21 bp, Artificial sequence
  SiRNA target sequence
ccttcaggatataaatatatc

SEQ ID NO: 306500 - DNA, 21 bp, Artificial sequence
  SiRNA target sequence
cttcaggatataaatatatca

SEQ ID NO: 306501 - DNA, 21 bp, Artificial sequence
  SiRNA target sequence
ttcaggatataaatatatcat

SEQ ID NO: 306502 - DNA, 21 bp, Artificial sequence
  SiRNA target sequence
tcaggatataaatatatcatg

SEQ ID NO: 306503 - DNA, 21 bp, Artificial sequence
  SiRNA target sequence
caggatataaatatatcatgg

SEQ ID NO: 306504 - DNA, 21 bp, Artificial sequence
  SiRNA target sequence
aggatataaatatatcatggg

SEQ ID NO: 306505 - DNA, 21 bp, Artificial sequence
  SiRNA target sequence
ggatataaatatatcatggga

SEQ ID NO: 306506 - DNA, 21 bp, Artificial sequence
  SiRNA target sequence
gatataaatatatcatgggag

SEQ ID NO: 306507 - DNA, 21 bp, Artificial sequence
  SiRNA target sequence
atataaatatatcatgggagt

SEQ ID NO: 306508 - DNA, 21 bp, Artificial sequence
  SiRNA target sequence
tataaatatatcatgggagtt

SEQ ID NO: 306509 - DNA, 21 bp, Artificial sequence
  SiRNA target sequence
ataaatatatcatgggagttc

SEQ ID NO: 306510 - DNA, 21 bp, Artificial sequence
  SiRNA target sequence
taaatatatcatgggagttct

SEQ ID NO: 306511 - DNA, 21 bp, Artificial sequence
  SiRNA target sequence
aaatatatcatgggagttctt

SEQ ID NO: 306512 - DNA, 21 bp, Artificial sequence
  SiRNA target sequence
aatatatcatgggagttcttg

SEQ ID NO: 306513 - DNA, 21 bp, Artificial sequence
  SiRNA target sequence
atatatcatgggagttcttga

SEQ ID NO: 306514 - DNA, 21 bp, Artificial sequence
  SiRNA target sequence
tatatcatgggagttcttgaa

SEQ ID NO: 306515 - DNA, 21 bp, Artificial sequence
  SiRNA target sequence
atatcatgggagttcttgaac

SEQ ID NO: 306516 - DNA, 21 bp, Artificial sequence
  SiRNA target sequence
tatcatgggagttcttgaaca

SEQ ID NO: 306517 - DNA, 21 bp, Artificial sequence
  SiRNA target sequence
atcatgggagttcttgaacaa

SEQ ID NO: 306518 - DNA, 21 bp, Artificial sequence
  SiRNA target sequence
tcatgggagttcttgaacaat

SEQ ID NO: 306519 - DNA, 21 bp, Artificial sequence
  SiRNA target sequence
catgggagttcttgaacaata

SEQ ID NO: 306520 - DNA, 21 bp, Artificial sequence
  SiRNA target sequence
atgggagttcttgaacaatac

SEQ ID NO: 306521 - DNA, 21 bp, Artificial sequence
  SiRNA target sequence
tgggagttcttgaacaataca

SEQ ID NO: 306522 - DNA, 21 bp, Artificial sequence
  SiRNA target sequence
gggagttcttgaacaatacaa

SEQ ID NO: 306523 - DNA, 21 bp, Artificial sequence
  SiRNA target sequence
ggagttcttgaacaatacaat

SEQ ID NO: 306524 - DNA, 21 bp, Artificial sequence
  SiRNA target sequence
gagttcttgaacaatacaatc

SEQ ID NO: 306525 - DNA, 21 bp, Artificial sequence
  SiRNA target sequence
agttcttgaacaatacaatcc

SEQ ID NO: 306526 - DNA, 21 bp, Artificial sequence
  SiRNA target sequence
gttcttgaacaatacaatcca

SEQ ID NO: 306527 - DNA, 21 bp, Artificial sequence
  SiRNA target sequence
ttcttgaacaatacaatccaa

SEQ ID NO: 306528 - DNA, 21 bp, Artificial sequence
  SiRNA target sequence
tcttgaacaatacaatccaag

SEQ ID NO: 306529 - DNA, 21 bp, Artificial sequence
  SiRNA target sequence
cttgaacaatacaatccaagt

SEQ ID NO: 306530 - DNA, 21 bp, Artificial sequence
  SiRNA target sequence
ttgaacaatacaatccaagtg

SEQ ID NO: 306531 - DNA, 21 bp, Artificial sequence
  SiRNA target sequence
tgaacaatacaatccaagtgt

SEQ ID NO: 306532 - DNA, 21 bp, Artificial sequence
  SiRNA target sequence
gaacaatacaatccaagtgtg

SEQ ID NO: 306533 - DNA, 21 bp, Artificial sequence
  SiRNA target sequence
aacaatacaatccaagtgtga

SEQ ID NO: 306534 - DNA, 21 bp, Artificial sequence
  SiRNA target sequence
acaatacaatccaagtgtgaa

SEQ ID NO: 306535 - DNA, 21 bp, Artificial sequence
  SiRNA target sequence
caatacaatccaagtgtgaaa

SEQ ID NO: 306536 - DNA, 21 bp, Artificial sequence
  SiRNA target sequence
aatacaatccaagtgtgaaac

SEQ ID NO: 306537 - DNA, 21 bp, Artificial sequence
  SiRNA target sequence
atacaatccaagtgtgaaaca

SEQ ID NO: 306538 - DNA, 21 bp, Artificial sequence
  SiRNA target sequence
tacaatccaagtgtgaaacaa

SEQ ID NO: 306539 - DNA, 21 bp, Artificial sequence
  SiRNA target sequence
acaatccaagtgtgaaacaag

SEQ ID NO: 306540 - DNA, 21 bp, Artificial sequence
  SiRNA target sequence
caatccaagtgtgaaacaagt

SEQ ID NO: 306541 - DNA, 21 bp, Artificial sequence
  SiRNA target sequence
aatccaagtgtgaaacaagtt

SEQ ID NO: 306542 - DNA, 21 bp, Artificial sequence
  SiRNA target sequence
atccaagtgtgaaacaagttt

SEQ ID NO: 306543 - DNA, 21 bp, Artificial sequence
  SiRNA target sequence
tccaagtgtgaaacaagtttc

SEQ ID NO: 306544 - DNA, 21 bp, Artificial sequence
  SiRNA target sequence
ccaagtgtgaaacaagtttct

SEQ ID NO: 306545 - DNA, 21 bp, Artificial sequence
  SiRNA target sequence
caagtgtgaaacaagtttcta

SEQ ID NO: 306546 - DNA, 21 bp, Artificial sequence
  SiRNA target sequence
aagtgtgaaacaagtttctat

SEQ ID NO: 306547 - DNA, 21 bp, Artificial sequence
  SiRNA target sequence
agtgtgaaacaagtttctatg

SEQ ID NO: 306548 - DNA, 21 bp, Artificial sequence
  SiRNA target sequence
gtgtgaaacaagtttctatgc

SEQ ID NO: 306549 - DNA, 21 bp, Artificial sequence
  SiRNA target sequence
tgtgaaacaagtttctatgca

SEQ ID NO: 306550 - DNA, 21 bp, Artificial sequence
  SiRNA target sequence
gtgaaacaagtttctatgcaa

SEQ ID NO: 306551 - DNA, 21 bp, Artificial sequence
  SiRNA target sequence
tgaaacaagtttctatgcaaa

SEQ ID NO: 306552 - DNA, 21 bp, Artificial sequence
  SiRNA target sequence
gaaacaagtttctatgcaaat

SEQ ID NO: 306553 - DNA, 21 bp, Artificial sequence
  SiRNA target sequence
aaacaagtttctatgcaaatc

SEQ ID NO: 306554 - DNA, 21 bp, Artificial sequence
  SiRNA target sequence
aacaagtttctatgcaaatcg

SEQ ID NO: 306555 - DNA, 21 bp, Artificial sequence
  SiRNA target sequence
acaagtttctatgcaaatcgc

SEQ ID NO: 306556 - DNA, 21 bp, Artificial sequence
  SiRNA target sequence
caagtttctatgcaaatcgca

SEQ ID NO: 306557 - DNA, 21 bp, Artificial sequence
  SiRNA target sequence
aagtttctatgcaaatcgcaa

SEQ ID NO: 306558 - DNA, 21 bp, Artificial sequence
  SiRNA target sequence
agtttctatgcaaatcgcaac

SEQ ID NO: 306559 - DNA, 21 bp, Artificial sequence
  SiRNA target sequence
gtttctatgcaaatcgcaaca

SEQ ID NO: 306560 - DNA, 21 bp, Artificial sequence
  SiRNA target sequence
tttctatgcaaatcgcaacac

SEQ ID NO: 306561 - DNA, 21 bp, Artificial sequence
  SiRNA target sequence
ttctatgcaaatcgcaacacc

SEQ ID NO: 306562 - DNA, 21 bp, Artificial sequence
  SiRNA target sequence
tctatgcaaatcgcaacacct

SEQ ID NO: 306563 - DNA, 21 bp, Artificial sequence
  SiRNA target sequence
ctatgcaaatcgcaacaccta

SEQ ID NO: 306564 - DNA, 21 bp, Artificial sequence
  SiRNA target sequence
tatgcaaatcgcaacacctaa

SEQ ID NO: 306565 - DNA, 21 bp, Artificial sequence
  SiRNA target sequence
atgcaaatcgcaacacctaac

SEQ ID NO: 306566 - DNA, 21 bp, Artificial sequence
  SiRNA target sequence
tgcaaatcgcaacacctaaca

SEQ ID NO: 306567 - DNA, 21 bp, Artificial sequence
  SiRNA target sequence
gcaaatcgcaacacctaacaa

SEQ ID NO: 306568 - DNA, 21 bp, Artificial sequence
  SiRNA target sequence
caaatcgcaacacctaacaaa

SEQ ID NO: 306569 - DNA, 21 bp, Artificial sequence
  SiRNA target sequence
aaatcgcaacacctaacaaat

SEQ ID NO: 306570 - DNA, 21 bp, Artificial sequence
  SiRNA target sequence
aatcgcaacacctaacaaatc

SEQ ID NO: 306571 - DNA, 21 bp, Artificial sequence
  SiRNA target sequence
atcgcaacacctaacaaatca

SEQ ID NO: 306572 - DNA, 21 bp, Artificial sequence
  SiRNA target sequence
tcgcaacacctaacaaatcaa

SEQ ID NO: 306573 - DNA, 21 bp, Artificial sequence
  SiRNA target sequence
cgcaacacctaacaaatcaaa

SEQ ID NO: 306574 - DNA, 21 bp, Artificial sequence
  SiRNA target sequence
gcaacacctaacaaatcaaaa

SEQ ID NO: 306575 - DNA, 21 bp, Artificial sequence
  SiRNA target sequence
caacacctaacaaatcaaaat

SEQ ID NO: 306576 - DNA, 21 bp, Artificial sequence
  SiRNA target sequence
aacacctaacaaatcaaaatc

SEQ ID NO: 306577 - DNA, 21 bp, Artificial sequence
  SiRNA target sequence
acacctaacaaatcaaaatca

SEQ ID NO: 306578 - DNA, 21 bp, Artificial sequence
  SiRNA target sequence
cacctaacaaatcaaaatcaa

SEQ ID NO: 306579 - DNA, 21 bp, Artificial sequence
  SiRNA target sequence
acctaacaaatcaaaatcaac

SEQ ID NO: 306580 - DNA, 21 bp, Artificial sequence
  SiRNA target sequence
cctaacaaatcaaaatcaaca

SEQ ID NO: 306581 - DNA, 21 bp, Artificial sequence
  SiRNA target sequence
ctaacaaatcaaaatcaacaa

SEQ ID NO: 306582 - DNA, 21 bp, Artificial sequence
  SiRNA target sequence
taacaaatcaaaatcaacaaa

SEQ ID NO: 306583 - DNA, 21 bp, Artificial sequence
  SiRNA target sequence
aacaaatcaaaatcaacaaaa

SEQ ID NO: 306584 - DNA, 21 bp, Artificial sequence
  SiRNA target sequence
acaaatcaaaatcaacaaaac

SEQ ID NO: 306585 - DNA, 21 bp, Artificial sequence
  SiRNA target sequence
caaatcaaaatcaacaaaacc

SEQ ID NO: 306586 - DNA, 21 bp, Artificial sequence
  SiRNA target sequence
aaatcaaaatcaacaaaacca

SEQ ID NO: 306587 - DNA, 21 bp, Artificial sequence
  SiRNA target sequence
aatcaaaatcaacaaaaccaa

SEQ ID NO: 306588 - DNA, 21 bp, Artificial sequence
  SiRNA target sequence
atcaaaatcaacaaaaccaac

SEQ ID NO: 306589 - DNA, 21 bp, Artificial sequence
  SiRNA target sequence
tcaaaatcaacaaaaccaaca

SEQ ID NO: 306590 - DNA, 21 bp, Artificial sequence
  SiRNA target sequence
caaaatcaacaaaaccaacat

SEQ ID NO: 306591 - DNA, 21 bp, Artificial sequence
  SiRNA target sequence
aaaatcaacaaaaccaacatc

SEQ ID NO: 306592 - DNA, 21 bp, Artificial sequence
  SiRNA target sequence
aaatcaacaaaaccaacatcc

SEQ ID NO: 306593 - DNA, 21 bp, Artificial sequence
  SiRNA target sequence
aatcaacaaaaccaacatccg

SEQ ID NO: 306594 - DNA, 21 bp, Artificial sequence
  SiRNA target sequence
atcaacaaaaccaacatccga

SEQ ID NO: 306595 - DNA, 21 bp, Artificial sequence
  SiRNA target sequence
tcaacaaaaccaacatccgaa

SEQ ID NO: 306596 - DNA, 21 bp, Artificial sequence
  SiRNA target sequence
caacaaaaccaacatccgaaa

SEQ ID NO: 306597 - DNA, 21 bp, Artificial sequence
  SiRNA target sequence
aacaaaaccaacatccgaaaa

SEQ ID NO: 306598 - DNA, 21 bp, Artificial sequence
  SiRNA target sequence
acaaaaccaacatccgaaaac

SEQ ID NO: 306599 - DNA, 21 bp, Artificial sequence
  SiRNA target sequence
caaaaccaacatccgaaaacc

SEQ ID NO: 306600 - DNA, 21 bp, Artificial sequence
  SiRNA target sequence
aaaaccaacatccgaaaaccc

SEQ ID NO: 306601 - DNA, 21 bp, Artificial sequence
  SiRNA target sequence
aaaccaacatccgaaaaccca

SEQ ID NO: 306602 - DNA, 21 bp, Artificial sequence
  SiRNA target sequence
aaccaacatccgaaaacccaa

SEQ ID NO: 306603 - DNA, 21 bp, Artificial sequence
  SiRNA target sequence
accaacatccgaaaacccaaa

SEQ ID NO: 306604 - DNA, 21 bp, Artificial sequence
  SiRNA target sequence
ccaacatccgaaaacccaaaa

SEQ ID NO: 306605 - DNA, 21 bp, Artificial sequence
  SiRNA target sequence
caacatccgaaaacccaaaaa

SEQ ID NO: 306606 - DNA, 21 bp, Artificial sequence
  SiRNA target sequence
aacatccgaaaacccaaaaat

SEQ ID NO: 306607 - DNA, 21 bp, Artificial sequence
  SiRNA target sequence
acatccgaaaacccaaaaatt

SEQ ID NO: 306608 - DNA, 21 bp, Artificial sequence
  SiRNA target sequence
catccgaaaacccaaaaattg

SEQ ID NO: 306609 - DNA, 21 bp, Artificial sequence
  SiRNA target sequence
atccgaaaacccaaaaattgg

SEQ ID NO: 306610 - DNA, 21 bp, Artificial sequence
  SiRNA target sequence
tccgaaaacccaaaaattgga

SEQ ID NO: 306611 - DNA, 21 bp, Artificial sequence
  SiRNA target sequence
ccgaaaacccaaaaattggac

SEQ ID NO: 306612 - DNA, 21 bp, Artificial sequence
  SiRNA target sequence
cgaaaacccaaaaattggacc

SEQ ID NO: 306613 - DNA, 21 bp, Artificial sequence
  SiRNA target sequence
gaaaacccaaaaattggacca

SEQ ID NO: 306614 - DNA, 21 bp, Artificial sequence
  SiRNA target sequence
aaaacccaaaaattggaccaa

SEQ ID NO: 306615 - DNA, 21 bp, Artificial sequence
  SiRNA target sequence
aaacccaaaaattggaccaat

SEQ ID NO: 306616 - DNA, 21 bp, Artificial sequence
  SiRNA target sequence
aacccaaaaattggaccaatt

SEQ ID NO: 306617 - DNA, 21 bp, Artificial sequence
  SiRNA target sequence
acccaaaaattggaccaattt

SEQ ID NO: 306618 - DNA, 21 bp, Artificial sequence
  SiRNA target sequence
cccaaaaattggaccaatttc

SEQ ID NO: 306619 - DNA, 21 bp, Artificial sequence
  SiRNA target sequence
ccaaaaattggaccaatttcc

SEQ ID NO: 306620 - DNA, 21 bp, Artificial sequence
  SiRNA target sequence
caaaaattggaccaatttccg

SEQ ID NO: 306621 - DNA, 21 bp, Artificial sequence
  SiRNA target sequence
aaaaattggaccaatttccga

SEQ ID NO: 306622 - DNA, 21 bp, Artificial sequence
  SiRNA target sequence
aaaattggaccaatttccgaa

SEQ ID NO: 306623 - DNA, 21 bp, Artificial sequence
  SiRNA target sequence
aaattggaccaatttccgaag

SEQ ID NO: 306624 - DNA, 21 bp, Artificial sequence
  SiRNA target sequence
aattggaccaatttccgaagt

SEQ ID NO: 306625 - DNA, 21 bp, Artificial sequence
  SiRNA target sequence
attggaccaatttccgaagtg

SEQ ID NO: 306626 - DNA, 21 bp, Artificial sequence
  SiRNA target sequence
ttggaccaatttccgaagtgg

SEQ ID NO: 306627 - DNA, 21 bp, Artificial sequence
  SiRNA target sequence
tggaccaatttccgaagtggc

SEQ ID NO: 306628 - DNA, 21 bp, Artificial sequence
  SiRNA target sequence
ggaccaatttccgaagtggct

SEQ ID NO: 306629 - DNA, 21 bp, Artificial sequence
  SiRNA target sequence
gaccaatttccgaagtggctt

SEQ ID NO: 306630 - DNA, 21 bp, Artificial sequence
  SiRNA target sequence
accaatttccgaagtggcttc

SEQ ID NO: 306631 - DNA, 21 bp, Artificial sequence
  SiRNA target sequence
ccaatttccgaagtggcttca

SEQ ID NO: 306632 - DNA, 21 bp, Artificial sequence
  SiRNA target sequence
caatttccgaagtggcttcag

SEQ ID NO: 306633 - DNA, 21 bp, Artificial sequence
  SiRNA target sequence
aatttccgaagtggcttcagg

SEQ ID NO: 306634 - DNA, 21 bp, Artificial sequence
  SiRNA target sequence
atttccgaagtggcttcagga

SEQ ID NO: 306635 - DNA, 21 bp, Artificial sequence
  SiRNA target sequence
tttccgaagtggcttcaggag

SEQ ID NO: 306636 - DNA, 21 bp, Artificial sequence
  SiRNA target sequence
ttccgaagtggcttcaggagt

SEQ ID NO: 306637 - DNA, 21 bp, Artificial sequence
  SiRNA target sequence
tccgaagtggcttcaggagtt

SEQ ID NO: 306638 - DNA, 21 bp, Artificial sequence
  SiRNA target sequence
ccgaagtggcttcaggagtta

SEQ ID NO: 306639 - DNA, 21 bp, Artificial sequence
  SiRNA target sequence
cgaagtggcttcaggagttaa

SEQ ID NO: 306640 - DNA, 21 bp, Artificial sequence
  SiRNA target sequence
gaagtggcttcaggagttaag

SEQ ID NO: 306641 - DNA, 21 bp, Artificial sequence
  SiRNA target sequence
aagtggcttcaggagttaaga

SEQ ID NO: 306642 - DNA, 21 bp, Artificial sequence
  SiRNA target sequence
agtggcttcaggagttaagac

SEQ ID NO: 306643 - DNA, 21 bp, Artificial sequence
  SiRNA target sequence
gtggcttcaggagttaagaca

SEQ ID NO: 306644 - DNA, 21 bp, Artificial sequence
  SiRNA target sequence
tggcttcaggagttaagacag

SEQ ID NO: 306645 - DNA, 21 bp, Artificial sequence
  SiRNA target sequence
ggcttcaggagttaagacagc

SEQ ID NO: 306646 - DNA, 21 bp, Artificial sequence
  SiRNA target sequence
gcttcaggagttaagacagct

SEQ ID NO: 306647 - DNA, 21 bp, Artificial sequence
  SiRNA target sequence
cttcaggagttaagacagctg

SEQ ID NO: 306648 - DNA, 21 bp, Artificial sequence
  SiRNA target sequence
ttcaggagttaagacagctgc

SEQ ID NO: 306649 - DNA, 21 bp, Artificial sequence
  SiRNA target sequence
tcaggagttaagacagctgca

SEQ ID NO: 306650 - DNA, 21 bp, Artificial sequence
  SiRNA target sequence
caggagttaagacagctgcaa

SEQ ID NO: 306651 - DNA, 21 bp, Artificial sequence
  SiRNA target sequence
aggagttaagacagctgcaaa

SEQ ID NO: 306652 - DNA, 21 bp, Artificial sequence
  SiRNA target sequence
ggagttaagacagctgcaaat

SEQ ID NO: 306653 - DNA, 21 bp, Artificial sequence
  SiRNA target sequence
gagttaagacagctgcaaatg

SEQ ID NO: 306654 - DNA, 21 bp, Artificial sequence
  SiRNA target sequence
agttaagacagctgcaaatgg

SEQ ID NO: 306655 - DNA, 21 bp, Artificial sequence
  SiRNA target sequence
gttaagacagctgcaaatggc

SEQ ID NO: 306656 - DNA, 21 bp, Artificial sequence
  SiRNA target sequence
ttaagacagctgcaaatggca

SEQ ID NO: 306657 - DNA, 21 bp, Artificial sequence
  SiRNA target sequence
taagacagctgcaaatggcat

SEQ ID NO: 306658 - DNA, 21 bp, Artificial sequence
  SiRNA target sequence
aagacagctgcaaatggcatc

SEQ ID NO: 306659 - DNA, 21 bp, Artificial sequence
  SiRNA target sequence
agacagctgcaaatggcatcg

SEQ ID NO: 306660 - DNA, 21 bp, Artificial sequence
  SiRNA target sequence
gacagctgcaaatggcatcga

SEQ ID NO: 306661 - DNA, 21 bp, Artificial sequence
  SiRNA target sequence
acagctgcaaatggcatcgag

SEQ ID NO: 306662 - DNA, 21 bp, Artificial sequence
  SiRNA target sequence
cagctgcaaatggcatcgagc

SEQ ID NO: 306663 - DNA, 21 bp, Artificial sequence
  SiRNA target sequence
agctgcaaatggcatcgagcg

SEQ ID NO: 306664 - DNA, 21 bp, Artificial sequence
  SiRNA target sequence
gctgcaaatggcatcgagcgc

SEQ ID NO: 306665 - DNA, 21 bp, Artificial sequence
  SiRNA target sequence
ctgcaaatggcatcgagcgca

SEQ ID NO: 306666 - DNA, 21 bp, Artificial sequence
  SiRNA target sequence
tgcaaatggcatcgagcgcat

SEQ ID NO: 306667 - DNA, 21 bp, Artificial sequence
  SiRNA target sequence
gcaaatggcatcgagcgcatt

SEQ ID NO: 306668 - DNA, 21 bp, Artificial sequence
  SiRNA target sequence
caaatggcatcgagcgcattc

SEQ ID NO: 306669 - DNA, 21 bp, Artificial sequence
  SiRNA target sequence
aaatggcatcgagcgcattcc

SEQ ID NO: 306670 - DNA, 21 bp, Artificial sequence
  SiRNA target sequence
aatggcatcgagcgcattcca

SEQ ID NO: 306671 - DNA, 21 bp, Artificial sequence
  SiRNA target sequence
atggcatcgagcgcattccag

SEQ ID NO: 306672 - DNA, 21 bp, Artificial sequence
  SiRNA target sequence
tggcatcgagcgcattccagt

SEQ ID NO: 306673 - DNA, 21 bp, Artificial sequence
  SiRNA target sequence
ggcatcgagcgcattccagtg

SEQ ID NO: 306674 - DNA, 21 bp, Artificial sequence
  SiRNA target sequence
gcatcgagcgcattccagtgc

SEQ ID NO: 306675 - DNA, 21 bp, Artificial sequence
  SiRNA target sequence
catcgagcgcattccagtgct

SEQ ID NO: 306676 - DNA, 21 bp, Artificial sequence
  SiRNA target sequence
atcgagcgcattccagtgcta

SEQ ID NO: 306677 - DNA, 21 bp, Artificial sequence
  SiRNA target sequence
tcgagcgcattccagtgctag

SEQ ID NO: 306678 - DNA, 21 bp, Artificial sequence
  SiRNA target sequence
cgagcgcattccagtgctagg

SEQ ID NO: 306679 - DNA, 21 bp, Artificial sequence
  SiRNA target sequence
gagcgcattccagtgctaggt

SEQ ID NO: 306680 - DNA, 21 bp, Artificial sequence
  SiRNA target sequence
agcgcattccagtgctaggtg

SEQ ID NO: 306681 - DNA, 21 bp, Artificial sequence
  SiRNA target sequence
gcgcattccagtgctaggtga

SEQ ID NO: 306682 - DNA, 21 bp, Artificial sequence
  SiRNA target sequence
cgcattccagtgctaggtgaa

SEQ ID NO: 306683 - DNA, 21 bp, Artificial sequence
  SiRNA target sequence
gcattccagtgctaggtgaaa

SEQ ID NO: 306684 - DNA, 21 bp, Artificial sequence
  SiRNA target sequence
cattccagtgctaggtgaaat

SEQ ID NO: 306685 - DNA, 21 bp, Artificial sequence
  SiRNA target sequence
attccagtgctaggtgaaatt

SEQ ID NO: 306686 - DNA, 21 bp, Artificial sequence
  SiRNA target sequence
ttccagtgctaggtgaaattg

SEQ ID NO: 306687 - DNA, 21 bp, Artificial sequence
  SiRNA target sequence
tccagtgctaggtgaaattgc

SEQ ID NO: 306688 - DNA, 21 bp, Artificial sequence
  SiRNA target sequence
ccagtgctaggtgaaattgca

SEQ ID NO: 306689 - DNA, 21 bp, Artificial sequence
  SiRNA target sequence
cagtgctaggtgaaattgcaa

SEQ ID NO: 306690 - DNA, 21 bp, Artificial sequence
  SiRNA target sequence
agtgctaggtgaaattgcaaa

SEQ ID NO: 306691 - DNA, 21 bp, Artificial sequence
  SiRNA target sequence
gtgctaggtgaaattgcaaag

SEQ ID NO: 306692 - DNA, 21 bp, Artificial sequence
  SiRNA target sequence
tgctaggtgaaattgcaaagc

SEQ ID NO: 306693 - DNA, 21 bp, Artificial sequence
  SiRNA target sequence
gctaggtgaaattgcaaagcc

SEQ ID NO: 306694 - DNA, 21 bp, Artificial sequence
  SiRNA target sequence
ctaggtgaaattgcaaagccg

SEQ ID NO: 306695 - DNA, 21 bp, Artificial sequence
  SiRNA target sequence
taggtgaaattgcaaagccgg

SEQ ID NO: 306696 - DNA, 21 bp, Artificial sequence
  SiRNA target sequence
aggtgaaattgcaaagccggt

SEQ ID NO: 306697 - DNA, 21 bp, Artificial sequence
  SiRNA target sequence
ggtgaaattgcaaagccggta

SEQ ID NO: 306698 - DNA, 21 bp, Artificial sequence
  SiRNA target sequence
gtgaaattgcaaagccggtaa

SEQ ID NO: 306699 - DNA, 21 bp, Artificial sequence
  SiRNA target sequence
tgaaattgcaaagccggtaac

SEQ ID NO: 306700 - DNA, 21 bp, Artificial sequence
  SiRNA target sequence
gaaattgcaaagccggtaact

SEQ ID NO: 306701 - DNA, 21 bp, Artificial sequence
  SiRNA target sequence
aaattgcaaagccggtaactg

SEQ ID NO: 306702 - DNA, 21 bp, Artificial sequence
  SiRNA target sequence
aattgcaaagccggtaactgc

SEQ ID NO: 306703 - DNA, 21 bp, Artificial sequence
  SiRNA target sequence
attgcaaagccggtaactgct

SEQ ID NO: 306704 - DNA, 21 bp, Artificial sequence
  SiRNA target sequence
ttgcaaagccggtaactgctg

SEQ ID NO: 306705 - DNA, 21 bp, Artificial sequence
  SiRNA target sequence
tgcaaagccggtaactgctgc

SEQ ID NO: 306706 - DNA, 21 bp, Artificial sequence
  SiRNA target sequence
gcaaagccggtaactgctgca

SEQ ID NO: 306707 - DNA, 21 bp, Artificial sequence
  SiRNA target sequence
caaagccggtaactgctgcag

SEQ ID NO: 306708 - DNA, 21 bp, Artificial sequence
  SiRNA target sequence
aaagccggtaactgctgcagt

SEQ ID NO: 306709 - DNA, 21 bp, Artificial sequence
  SiRNA target sequence
aagccggtaactgctgcagtt

SEQ ID NO: 306710 - DNA, 21 bp, Artificial sequence
  SiRNA target sequence
agccggtaactgctgcagtta

SEQ ID NO: 306711 - DNA, 21 bp, Artificial sequence
  SiRNA target sequence
gccggtaactgctgcagttaa

SEQ ID NO: 306712 - DNA, 21 bp, Artificial sequence
  SiRNA target sequence
ccggtaactgctgcagttaaa

SEQ ID NO: 306713 - DNA, 21 bp, Artificial sequence
  SiRNA target sequence
cggtaactgctgcagttaaat

SEQ ID NO: 306714 - DNA, 21 bp, Artificial sequence
  SiRNA target sequence
ggtaactgctgcagttaaatg

SEQ ID NO: 306715 - DNA, 21 bp, Artificial sequence
  SiRNA target sequence
gtaactgctgcagttaaatgg

SEQ ID NO: 306716 - DNA, 21 bp, Artificial sequence
  SiRNA target sequence
taactgctgcagttaaatggt

SEQ ID NO: 306717 - DNA, 21 bp, Artificial sequence
  SiRNA target sequence
aactgctgcagttaaatggtt

SEQ ID NO: 306718 - DNA, 21 bp, Artificial sequence
  SiRNA target sequence
actgctgcagttaaatggttt

SEQ ID NO: 306719 - DNA, 21 bp, Artificial sequence
  SiRNA target sequence
ctgctgcagttaaatggtttg

SEQ ID NO: 306720 - DNA, 21 bp, Artificial sequence
  SiRNA target sequence
tgctgcagttaaatggtttgc

SEQ ID NO: 306721 - DNA, 21 bp, Artificial sequence
  SiRNA target sequence
gctgcagttaaatggtttgct

SEQ ID NO: 306722 - DNA, 21 bp, Artificial sequence
  SiRNA target sequence
ctgcagttaaatggtttgctg

SEQ ID NO: 306723 - DNA, 21 bp, Artificial sequence
  SiRNA target sequence
tgcagttaaatggtttgctga

SEQ ID NO: 306724 - DNA, 21 bp, Artificial sequence
  SiRNA target sequence
gcagttaaatggtttgctgat

SEQ ID NO: 306725 - DNA, 21 bp, Artificial sequence
  SiRNA target sequence
cagttaaatggtttgctgata

SEQ ID NO: 306726 - DNA, 21 bp, Artificial sequence
  SiRNA target sequence
agttaaatggtttgctgatat

SEQ ID NO: 306727 - DNA, 21 bp, Artificial sequence
  SiRNA target sequence
gttaaatggtttgctgatatt

SEQ ID NO: 306728 - DNA, 21 bp, Artificial sequence
  SiRNA target sequence
ttaaatggtttgctgatattg

SEQ ID NO: 306729 - DNA, 21 bp, Artificial sequence
  SiRNA target sequence
taaatggtttgctgatattgt

SEQ ID NO: 306730 - DNA, 21 bp, Artificial sequence
  SiRNA target sequence
aaatggtttgctgatattgta

SEQ ID NO: 306731 - DNA, 21 bp, Artificial sequence
  SiRNA target sequence
aatggtttgctgatattgtag

SEQ ID NO: 306732 - DNA, 21 bp, Artificial sequence
  SiRNA target sequence
atggtttgctgatattgtagg

SEQ ID NO: 306733 - DNA, 21 bp, Artificial sequence
  SiRNA target sequence
tggtttgctgatattgtagga

SEQ ID NO: 306734 - DNA, 21 bp, Artificial sequence
  SiRNA target sequence
ggtttgctgatattgtaggag

SEQ ID NO: 306735 - DNA, 21 bp, Artificial sequence
  SiRNA target sequence
gtttgctgatattgtaggagg

SEQ ID NO: 306736 - DNA, 21 bp, Artificial sequence
  SiRNA target sequence
tttgctgatattgtaggaggt

SEQ ID NO: 306737 - DNA, 21 bp, Artificial sequence
  SiRNA target sequence
ttgctgatattgtaggaggtg

SEQ ID NO: 306738 - DNA, 21 bp, Artificial sequence
  SiRNA target sequence
tgctgatattgtaggaggtgt

SEQ ID NO: 306739 - DNA, 21 bp, Artificial sequence
  SiRNA target sequence
gctgatattgtaggaggtgta

SEQ ID NO: 306740 - DNA, 21 bp, Artificial sequence
  SiRNA target sequence
ctgatattgtaggaggtgtag

SEQ ID NO: 306741 - DNA, 21 bp, Artificial sequence
  SiRNA target sequence
tgatattgtaggaggtgtagc

SEQ ID NO: 306742 - DNA, 21 bp, Artificial sequence
  SiRNA target sequence
gatattgtaggaggtgtagca

SEQ ID NO: 306743 - DNA, 21 bp, Artificial sequence
  SiRNA target sequence
atattgtaggaggtgtagcag

SEQ ID NO: 306744 - DNA, 21 bp, Artificial sequence
  SiRNA target sequence
tattgtaggaggtgtagcagc

SEQ ID NO: 306745 - DNA, 21 bp, Artificial sequence
  SiRNA target sequence
attgtaggaggtgtagcagcc

SEQ ID NO: 306746 - DNA, 21 bp, Artificial sequence
  SiRNA target sequence
ttgtaggaggtgtagcagcca

SEQ ID NO: 306747 - DNA, 21 bp, Artificial sequence
  SiRNA target sequence
tgtaggaggtgtagcagccat

SEQ ID NO: 306748 - DNA, 21 bp, Artificial sequence
  SiRNA target sequence
gtaggaggtgtagcagccata

SEQ ID NO: 306749 - DNA, 21 bp, Artificial sequence
  SiRNA target sequence
taggaggtgtagcagccatat

SEQ ID NO: 306750 - DNA, 21 bp, Artificial sequence
  SiRNA target sequence
aggaggtgtagcagccatatt

SEQ ID NO: 306751 - DNA, 21 bp, Artificial sequence
  SiRNA target sequence
ggaggtgtagcagccatattc

SEQ ID NO: 306752 - DNA, 21 bp, Artificial sequence
  SiRNA target sequence
gaggtgtagcagccatattcg

SEQ ID NO: 306753 - DNA, 21 bp, Artificial sequence
  SiRNA target sequence
aggtgtagcagccatattcgg

SEQ ID NO: 306754 - DNA, 21 bp, Artificial sequence
  SiRNA target sequence
ggtgtagcagccatattcggg

SEQ ID NO: 306755 - DNA, 21 bp, Artificial sequence
  SiRNA target sequence
gtgtagcagccatattcgggt

SEQ ID NO: 306756 - DNA, 21 bp, Artificial sequence
  SiRNA target sequence
tgtagcagccatattcgggtg

SEQ ID NO: 306757 - DNA, 21 bp, Artificial sequence
  SiRNA target sequence
gtagcagccatattcgggtgg

SEQ ID NO: 306758 - DNA, 21 bp, Artificial sequence
  SiRNA target sequence
tagcagccatattcgggtggt

SEQ ID NO: 306759 - DNA, 21 bp, Artificial sequence
  SiRNA target sequence
agcagccatattcgggtggtc

SEQ ID NO: 306760 - DNA, 21 bp, Artificial sequence
  SiRNA target sequence
gcagccatattcgggtggtcc

SEQ ID NO: 306761 - DNA, 21 bp, Artificial sequence
  SiRNA target sequence
cagccatattcgggtggtcca

SEQ ID NO: 306762 - DNA, 21 bp, Artificial sequence
  SiRNA target sequence
agccatattcgggtggtccaa

SEQ ID NO: 306763 - DNA, 21 bp, Artificial sequence
  SiRNA target sequence
gccatattcgggtggtccaaa

SEQ ID NO: 306764 - DNA, 21 bp, Artificial sequence
  SiRNA target sequence
ccatattcgggtggtccaaac

SEQ ID NO: 306765 - DNA, 21 bp, Artificial sequence
  SiRNA target sequence
catattcgggtggtccaaacc

SEQ ID NO: 306766 - DNA, 21 bp, Artificial sequence
  SiRNA target sequence
atattcgggtggtccaaaccc

SEQ ID NO: 306767 - DNA, 21 bp, Artificial sequence
  SiRNA target sequence
tattcgggtggtccaaacccc

SEQ ID NO: 306768 - DNA, 21 bp, Artificial sequence
  SiRNA target sequence
attcgggtggtccaaaccccg

SEQ ID NO: 306769 - DNA, 21 bp, Artificial sequence
  SiRNA target sequence
ttcgggtggtccaaaccccga

SEQ ID NO: 306770 - DNA, 21 bp, Artificial sequence
  SiRNA target sequence
tcgggtggtccaaaccccgaa

SEQ ID NO: 306771 - DNA, 21 bp, Artificial sequence
  SiRNA target sequence
cgggtggtccaaaccccgaaa

SEQ ID NO: 306772 - DNA, 21 bp, Artificial sequence
  SiRNA target sequence
gggtggtccaaaccccgaaat

SEQ ID NO: 306773 - DNA, 21 bp, Artificial sequence
  SiRNA target sequence
ggtggtccaaaccccgaaatc

SEQ ID NO: 306774 - DNA, 21 bp, Artificial sequence
  SiRNA target sequence
gtggtccaaaccccgaaatca

SEQ ID NO: 306775 - DNA, 21 bp, Artificial sequence
  SiRNA target sequence
tggtccaaaccccgaaatcag

SEQ ID NO: 306776 - DNA, 21 bp, Artificial sequence
  SiRNA target sequence
ggtccaaaccccgaaatcaga

SEQ ID NO: 306777 - DNA, 21 bp, Artificial sequence
  SiRNA target sequence
gtccaaaccccgaaatcagaa

SEQ ID NO: 306778 - DNA, 21 bp, Artificial sequence
  SiRNA target sequence
tccaaaccccgaaatcagaat

SEQ ID NO: 306779 - DNA, 21 bp, Artificial sequence
  SiRNA target sequence
ccaaaccccgaaatcagaatc

SEQ ID NO: 306780 - DNA, 21 bp, Artificial sequence
  SiRNA target sequence
caaaccccgaaatcagaatca

SEQ ID NO: 306781 - DNA, 21 bp, Artificial sequence
  SiRNA target sequence
aaaccccgaaatcagaatcaa

SEQ ID NO: 306782 - DNA, 21 bp, Artificial sequence
  SiRNA target sequence
aaccccgaaatcagaatcaag

SEQ ID NO: 306783 - DNA, 21 bp, Artificial sequence
  SiRNA target sequence
accccgaaatcagaatcaagt

SEQ ID NO: 306784 - DNA, 21 bp, Artificial sequence
  SiRNA target sequence
ccccgaaatcagaatcaagtg

SEQ ID NO: 306785 - DNA, 21 bp, Artificial sequence
  SiRNA target sequence
cccgaaatcagaatcaagtga

SEQ ID NO: 306786 - DNA, 21 bp, Artificial sequence
  SiRNA target sequence
ccgaaatcagaatcaagtgat

SEQ ID NO: 306787 - DNA, 21 bp, Artificial sequence
  SiRNA target sequence
cgaaatcagaatcaagtgatg

SEQ ID NO: 306788 - DNA, 21 bp, Artificial sequence
  SiRNA target sequence
gaaatcagaatcaagtgatgc

SEQ ID NO: 306789 - DNA, 21 bp, Artificial sequence
  SiRNA target sequence
aaatcagaatcaagtgatgcc

SEQ ID NO: 306790 - DNA, 21 bp, Artificial sequence
  SiRNA target sequence
aatcagaatcaagtgatgcct

SEQ ID NO: 306791 - DNA, 21 bp, Artificial sequence
  SiRNA target sequence
atcagaatcaagtgatgcctt

SEQ ID NO: 306792 - DNA, 21 bp, Artificial sequence
  SiRNA target sequence
tcagaatcaagtgatgcctta

SEQ ID NO: 306793 - DNA, 21 bp, Artificial sequence
  SiRNA target sequence
cagaatcaagtgatgccttat

SEQ ID NO: 306794 - DNA, 21 bp, Artificial sequence
  SiRNA target sequence
agaatcaagtgatgccttatc

SEQ ID NO: 306795 - DNA, 21 bp, Artificial sequence
  SiRNA target sequence
gaatcaagtgatgccttatca

SEQ ID NO: 306796 - DNA, 21 bp, Artificial sequence
  SiRNA target sequence
aatcaagtgatgccttatcag

SEQ ID NO: 306797 - DNA, 21 bp, Artificial sequence
  SiRNA target sequence
atcaagtgatgccttatcaga

SEQ ID NO: 306798 - DNA, 21 bp, Artificial sequence
  SiRNA target sequence
tcaagtgatgccttatcagaa

SEQ ID NO: 306799 - DNA, 21 bp, Artificial sequence
  SiRNA target sequence
caagtgatgccttatcagaat

SEQ ID NO: 306800 - DNA, 21 bp, Artificial sequence
  SiRNA target sequence
aagtgatgccttatcagaatg

SEQ ID NO: 306801 - DNA, 21 bp, Artificial sequence
  SiRNA target sequence
agtgatgccttatcagaatgt

SEQ ID NO: 306802 - DNA, 21 bp, Artificial sequence
  SiRNA target sequence
gtgatgccttatcagaatgtg

SEQ ID NO: 306803 - DNA, 21 bp, Artificial sequence
  SiRNA target sequence
tgatgccttatcagaatgtgc

SEQ ID NO: 306804 - DNA, 21 bp, Artificial sequence
  SiRNA target sequence
gatgccttatcagaatgtgcc

SEQ ID NO: 306805 - DNA, 21 bp, Artificial sequence
  SiRNA target sequence
atgccttatcagaatgtgcct

SEQ ID NO: 306806 - DNA, 21 bp, Artificial sequence
  SiRNA target sequence
tgccttatcagaatgtgcctg

SEQ ID NO: 306807 - DNA, 21 bp, Artificial sequence
  SiRNA target sequence
gccttatcagaatgtgcctgg

SEQ ID NO: 306808 - DNA, 21 bp, Artificial sequence
  SiRNA target sequence
ccttatcagaatgtgcctgga

SEQ ID NO: 306809 - DNA, 21 bp, Artificial sequence
  SiRNA target sequence
cttatcagaatgtgcctggat

SEQ ID NO: 306810 - DNA, 21 bp, Artificial sequence
  SiRNA target sequence
ttatcagaatgtgcctggatg

SEQ ID NO: 306811 - DNA, 21 bp, Artificial sequence
  SiRNA target sequence
tatcagaatgtgcctggatgg

SEQ ID NO: 306812 - DNA, 21 bp, Artificial sequence
  SiRNA target sequence
atcagaatgtgcctggatggg

SEQ ID NO: 306813 - DNA, 21 bp, Artificial sequence
  SiRNA target sequence
tcagaatgtgcctggatgggg

SEQ ID NO: 306814 - DNA, 21 bp, Artificial sequence
  SiRNA target sequence
cagaatgtgcctggatgggga

SEQ ID NO: 306815 - DNA, 21 bp, Artificial sequence
  SiRNA target sequence
agaatgtgcctggatggggat

SEQ ID NO: 306816 - DNA, 21 bp, Artificial sequence
  SiRNA target sequence
gaatgtgcctggatggggata

SEQ ID NO: 306817 - DNA, 21 bp, Artificial sequence
  SiRNA target sequence
aatgtgcctggatggggatat

SEQ ID NO: 306818 - DNA, 21 bp, Artificial sequence
  SiRNA target sequence
atgtgcctggatggggatatt

SEQ ID NO: 306819 - DNA, 21 bp, Artificial sequence
  SiRNA target sequence
tgtgcctggatggggatattc

SEQ ID NO: 306820 - DNA, 21 bp, Artificial sequence
  SiRNA target sequence
gtgcctggatggggatattcc

SEQ ID NO: 306821 - DNA, 21 bp, Artificial sequence
  SiRNA target sequence
tgcctggatggggatattccc

SEQ ID NO: 306822 - DNA, 21 bp, Artificial sequence
  SiRNA target sequence
gcctggatggggatattccct

SEQ ID NO: 306823 - DNA, 21 bp, Artificial sequence
  SiRNA target sequence
cctggatggggatattcccta

SEQ ID NO: 306824 - DNA, 21 bp, Artificial sequence
  SiRNA target sequence
ctggatggggatattccctat

SEQ ID NO: 306825 - DNA, 21 bp, Artificial sequence
  SiRNA target sequence
tggatggggatattccctata

SEQ ID NO: 306826 - DNA, 21 bp, Artificial sequence
  SiRNA target sequence
ggatggggatattccctatat

SEQ ID NO: 306827 - DNA, 21 bp, Artificial sequence
  SiRNA target sequence
gatggggatattccctatata

SEQ ID NO: 306828 - DNA, 21 bp, Artificial sequence
  SiRNA target sequence
atggggatattccctatataa

SEQ ID NO: 306829 - DNA, 21 bp, Artificial sequence
  SiRNA target sequence
tggggatattccctatataaa

SEQ ID NO: 306830 - DNA, 21 bp, Artificial sequence
  SiRNA target sequence
ggggatattccctatataaag

SEQ ID NO: 306831 - DNA, 21 bp, Artificial sequence
  SiRNA target sequence
gggatattccctatataaagg

SEQ ID NO: 306832 - DNA, 21 bp, Artificial sequence
  SiRNA target sequence
ggatattccctatataaaggc

SEQ ID NO: 306833 - DNA, 21 bp, Artificial sequence
  SiRNA target sequence
gatattccctatataaaggca

SEQ ID NO: 306834 - DNA, 21 bp, Artificial sequence
  SiRNA target sequence
atattccctatataaaggcat

SEQ ID NO: 306835 - DNA, 21 bp, Artificial sequence
  SiRNA target sequence
tattccctatataaaggcatt

SEQ ID NO: 306836 - DNA, 21 bp, Artificial sequence
  SiRNA target sequence
attccctatataaaggcattg

SEQ ID NO: 306837 - DNA, 21 bp, Artificial sequence
  SiRNA target sequence
ttccctatataaaggcattga

SEQ ID NO: 306838 - DNA, 21 bp, Artificial sequence
  SiRNA target sequence
tccctatataaaggcattgac

SEQ ID NO: 306839 - DNA, 21 bp, Artificial sequence
  SiRNA target sequence
ccctatataaaggcattgaca

SEQ ID NO: 306840 - DNA, 21 bp, Artificial sequence
  SiRNA target sequence
cctatataaaggcattgacat

SEQ ID NO: 306841 - DNA, 21 bp, Artificial sequence
  SiRNA target sequence
ctatataaaggcattgacatg

SEQ ID NO: 306842 - DNA, 21 bp, Artificial sequence
  SiRNA target sequence
tatataaaggcattgacatga

SEQ ID NO: 306843 - DNA, 21 bp, Artificial sequence
  SiRNA target sequence
atataaaggcattgacatgag

SEQ ID NO: 306844 - DNA, 21 bp, Artificial sequence
  SiRNA target sequence
tataaaggcattgacatgagt

SEQ ID NO: 306845 - DNA, 21 bp, Artificial sequence
  SiRNA target sequence
ataaaggcattgacatgagtg

SEQ ID NO: 306846 - DNA, 21 bp, Artificial sequence
  SiRNA target sequence
taaaggcattgacatgagtgt

SEQ ID NO: 306847 - DNA, 21 bp, Artificial sequence
  SiRNA target sequence
aaaggcattgacatgagtgta

SEQ ID NO: 306848 - DNA, 21 bp, Artificial sequence
  SiRNA target sequence
aaggcattgacatgagtgtac

SEQ ID NO: 306849 - DNA, 21 bp, Artificial sequence
  SiRNA target sequence
aggcattgacatgagtgtacc

SEQ ID NO: 306850 - DNA, 21 bp, Artificial sequence
  SiRNA target sequence
ggcattgacatgagtgtacca

SEQ ID NO: 306851 - DNA, 21 bp, Artificial sequence
  SiRNA target sequence
gcattgacatgagtgtaccac

SEQ ID NO: 306852 - DNA, 21 bp, Artificial sequence
  SiRNA target sequence
cattgacatgagtgtaccact

SEQ ID NO: 306853 - DNA, 21 bp, Artificial sequence
  SiRNA target sequence
attgacatgagtgtaccactt

SEQ ID NO: 306854 - DNA, 21 bp, Artificial sequence
  SiRNA target sequence
ttgacatgagtgtaccacttg

SEQ ID NO: 306855 - DNA, 21 bp, Artificial sequence
  SiRNA target sequence
tgacatgagtgtaccacttgc

SEQ ID NO: 306856 - DNA, 21 bp, Artificial sequence
  SiRNA target sequence
gacatgagtgtaccacttgct

SEQ ID NO: 306857 - DNA, 21 bp, Artificial sequence
  SiRNA target sequence
acatgagtgtaccacttgctt

SEQ ID NO: 306858 - DNA, 21 bp, Artificial sequence
  SiRNA target sequence
catgagtgtaccacttgctta

SEQ ID NO: 306859 - DNA, 21 bp, Artificial sequence
  SiRNA target sequence
atgagtgtaccacttgcttat

SEQ ID NO: 306860 - DNA, 21 bp, Artificial sequence
  SiRNA target sequence
tgagtgtaccacttgcttatg

SEQ ID NO: 306861 - DNA, 21 bp, Artificial sequence
  SiRNA target sequence
gagtgtaccacttgcttatga

SEQ ID NO: 306862 - DNA, 21 bp, Artificial sequence
  SiRNA target sequence
agtgtaccacttgcttatgac

SEQ ID NO: 306863 - DNA, 21 bp, Artificial sequence
  SiRNA target sequence
gtgtaccacttgcttatgacc

SEQ ID NO: 306864 - DNA, 21 bp, Artificial sequence
  SiRNA target sequence
tgtaccacttgcttatgaccc

SEQ ID NO: 306865 - DNA, 21 bp, Artificial sequence
  SiRNA target sequence
gtaccacttgcttatgacccc

SEQ ID NO: 306866 - DNA, 21 bp, Artificial sequence
  SiRNA target sequence
taccacttgcttatgacccca

SEQ ID NO: 306867 - DNA, 21 bp, Artificial sequence
  SiRNA target sequence
accacttgcttatgaccccaa

SEQ ID NO: 306868 - DNA, 21 bp, Artificial sequence
  SiRNA target sequence
ccacttgcttatgaccccaat

SEQ ID NO: 306869 - DNA, 21 bp, Artificial sequence
  SiRNA target sequence
cacttgcttatgaccccaata

SEQ ID NO: 306870 - DNA, 21 bp, Artificial sequence
  SiRNA target sequence
acttgcttatgaccccaataa

SEQ ID NO: 306871 - DNA, 21 bp, Artificial sequence
  SiRNA target sequence
cttgcttatgaccccaataac

SEQ ID NO: 306872 - DNA, 21 bp, Artificial sequence
  SiRNA target sequence
ttgcttatgaccccaataacg

SEQ ID NO: 306873 - DNA, 21 bp, Artificial sequence
  SiRNA target sequence
tgcttatgaccccaataacga

SEQ ID NO: 306874 - DNA, 21 bp, Artificial sequence
  SiRNA target sequence
gcttatgaccccaataacgaa

SEQ ID NO: 306875 - DNA, 21 bp, Artificial sequence
  SiRNA target sequence
cttatgaccccaataacgaat

SEQ ID NO: 306876 - DNA, 21 bp, Artificial sequence
  SiRNA target sequence
ttatgaccccaataacgaatt

SEQ ID NO: 306877 - DNA, 21 bp, Artificial sequence
  SiRNA target sequence
tatgaccccaataacgaatta

SEQ ID NO: 306878 - DNA, 21 bp, Artificial sequence
  SiRNA target sequence
atgaccccaataacgaattag

SEQ ID NO: 306879 - DNA, 21 bp, Artificial sequence
  SiRNA target sequence
tgaccccaataacgaattagg

SEQ ID NO: 306880 - DNA, 21 bp, Artificial sequence
  SiRNA target sequence
gaccccaataacgaattagga

SEQ ID NO: 306881 - DNA, 21 bp, Artificial sequence
  SiRNA target sequence
accccaataacgaattaggag

SEQ ID NO: 306882 - DNA, 21 bp, Artificial sequence
  SiRNA target sequence
ccccaataacgaattaggaga

SEQ ID NO: 306883 - DNA, 21 bp, Artificial sequence
  SiRNA target sequence
cccaataacgaattaggagac

SEQ ID NO: 306884 - DNA, 21 bp, Artificial sequence
  SiRNA target sequence
ccaataacgaattaggagact

SEQ ID NO: 306885 - DNA, 21 bp, Artificial sequence
  SiRNA target sequence
caataacgaattaggagactt

SEQ ID NO: 306886 - DNA, 21 bp, Artificial sequence
  SiRNA target sequence
aataacgaattaggagacttg

SEQ ID NO: 306887 - DNA, 21 bp, Artificial sequence
  SiRNA target sequence
ataacgaattaggagacttgc

SEQ ID NO: 306888 - DNA, 21 bp, Artificial sequence
  SiRNA target sequence
taacgaattaggagacttgcg

SEQ ID NO: 306889 - DNA, 21 bp, Artificial sequence
  SiRNA target sequence
aacgaattaggagacttgcga

SEQ ID NO: 306890 - DNA, 21 bp, Artificial sequence
  SiRNA target sequence
acgaattaggagacttgcgag

SEQ ID NO: 306891 - DNA, 21 bp, Artificial sequence
  SiRNA target sequence
cgaattaggagacttgcgaga

SEQ ID NO: 306892 - DNA, 21 bp, Artificial sequence
  SiRNA target sequence
gaattaggagacttgcgagat

SEQ ID NO: 306893 - DNA, 21 bp, Artificial sequence
  SiRNA target sequence
aattaggagacttgcgagatg

SEQ ID NO: 306894 - DNA, 21 bp, Artificial sequence
  SiRNA target sequence
attaggagacttgcgagatgt

SEQ ID NO: 306895 - DNA, 21 bp, Artificial sequence
  SiRNA target sequence
ttaggagacttgcgagatgta

SEQ ID NO: 306896 - DNA, 21 bp, Artificial sequence
  SiRNA target sequence
taggagacttgcgagatgtat

SEQ ID NO: 306897 - DNA, 21 bp, Artificial sequence
  SiRNA target sequence
aggagacttgcgagatgtatt

SEQ ID NO: 306898 - DNA, 21 bp, Artificial sequence
  SiRNA target sequence
ggagacttgcgagatgtattt

SEQ ID NO: 306899 - DNA, 21 bp, Artificial sequence
  SiRNA target sequence
gagacttgcgagatgtatttc

SEQ ID NO: 306900 - DNA, 21 bp, Artificial sequence
  SiRNA target sequence
agacttgcgagatgtatttcc

SEQ ID NO: 306901 - DNA, 21 bp, Artificial sequence
  SiRNA target sequence
gacttgcgagatgtatttcca

SEQ ID NO: 306902 - DNA, 21 bp, Artificial sequence
  SiRNA target sequence
acttgcgagatgtatttccat

SEQ ID NO: 306903 - DNA, 21 bp, Artificial sequence
  SiRNA target sequence
cttgcgagatgtatttccatc

SEQ ID NO: 306904 - DNA, 21 bp, Artificial sequence
  SiRNA target sequence
ttgcgagatgtatttccatct

SEQ ID NO: 306905 - DNA, 21 bp, Artificial sequence
  SiRNA target sequence
tgcgagatgtatttccatctg

SEQ ID NO: 306906 - DNA, 21 bp, Artificial sequence
  SiRNA target sequence
gcgagatgtatttccatctgc

SEQ ID NO: 306907 - DNA, 21 bp, Artificial sequence
  SiRNA target sequence
cgagatgtatttccatctgcc

SEQ ID NO: 306908 - DNA, 21 bp, Artificial sequence
  SiRNA target sequence
gagatgtatttccatctgccg

SEQ ID NO: 306909 - DNA, 21 bp, Artificial sequence
  SiRNA target sequence
agatgtatttccatctgccgt

SEQ ID NO: 306910 - DNA, 21 bp, Artificial sequence
  SiRNA target sequence
gatgtatttccatctgccgta

SEQ ID NO: 306911 - DNA, 21 bp, Artificial sequence
  SiRNA target sequence
atgtatttccatctgccgtag

SEQ ID NO: 306912 - DNA, 21 bp, Artificial sequence
  SiRNA target sequence
tgtatttccatctgccgtaga

SEQ ID NO: 306913 - DNA, 21 bp, Artificial sequence
  SiRNA target sequence
gtatttccatctgccgtagac

SEQ ID NO: 306914 - DNA, 21 bp, Artificial sequence
  SiRNA target sequence
tatttccatctgccgtagacg

SEQ ID NO: 306915 - DNA, 21 bp, Artificial sequence
  SiRNA target sequence
atttccatctgccgtagacga

SEQ ID NO: 306916 - DNA, 21 bp, Artificial sequence
  SiRNA target sequence
tttccatctgccgtagacgaa

SEQ ID NO: 306917 - DNA, 21 bp, Artificial sequence
  SiRNA target sequence
ttccatctgccgtagacgaaa

SEQ ID NO: 306918 - DNA, 21 bp, Artificial sequence
  SiRNA target sequence
tccatctgccgtagacgaaat

SEQ ID NO: 306919 - DNA, 21 bp, Artificial sequence
  SiRNA target sequence
ccatctgccgtagacgaaatg

SEQ ID NO: 306920 - DNA, 21 bp, Artificial sequence
  SiRNA target sequence
catctgccgtagacgaaatgg

SEQ ID NO: 306921 - DNA, 21 bp, Artificial sequence
  SiRNA target sequence
atctgccgtagacgaaatggc

SEQ ID NO: 306922 - DNA, 21 bp, Artificial sequence
  SiRNA target sequence
tctgccgtagacgaaatggct

SEQ ID NO: 306923 - DNA, 21 bp, Artificial sequence
  SiRNA target sequence
ctgccgtagacgaaatggcta

SEQ ID NO: 306924 - DNA, 21 bp, Artificial sequence
  SiRNA target sequence
tgccgtagacgaaatggctat

SEQ ID NO: 306925 - DNA, 21 bp, Artificial sequence
  SiRNA target sequence
gccgtagacgaaatggctatt

SEQ ID NO: 306926 - DNA, 21 bp, Artificial sequence
  SiRNA target sequence
ccgtagacgaaatggctattg

SEQ ID NO: 306927 - DNA, 21 bp, Artificial sequence
  SiRNA target sequence
cgtagacgaaatggctattgg

SEQ ID NO: 306928 - DNA, 21 bp, Artificial sequence
  SiRNA target sequence
gtagacgaaatggctattgga

SEQ ID NO: 306929 - DNA, 21 bp, Artificial sequence
  SiRNA target sequence
tagacgaaatggctattggat

SEQ ID NO: 306930 - DNA, 21 bp, Artificial sequence
  SiRNA target sequence
agacgaaatggctattggata

SEQ ID NO: 306931 - DNA, 21 bp, Artificial sequence
  SiRNA target sequence
gacgaaatggctattggatat

SEQ ID NO: 306932 - DNA, 21 bp, Artificial sequence
  SiRNA target sequence
acgaaatggctattggatatg

SEQ ID NO: 306933 - DNA, 21 bp, Artificial sequence
  SiRNA target sequence
cgaaatggctattggatatgt

SEQ ID NO: 306934 - DNA, 21 bp, Artificial sequence
  SiRNA target sequence
gaaatggctattggatatgtt

SEQ ID NO: 306935 - DNA, 21 bp, Artificial sequence
  SiRNA target sequence
aaatggctattggatatgttt

SEQ ID NO: 306936 - DNA, 21 bp, Artificial sequence
  SiRNA target sequence
aatggctattggatatgtttg

SEQ ID NO: 306937 - DNA, 21 bp, Artificial sequence
  SiRNA target sequence
atggctattggatatgtttgt

SEQ ID NO: 306938 - DNA, 21 bp, Artificial sequence
  SiRNA target sequence
tggctattggatatgtttgtg

SEQ ID NO: 306939 - DNA, 21 bp, Artificial sequence
  SiRNA target sequence
ggctattggatatgtttgtgg

SEQ ID NO: 306940 - DNA, 21 bp, Artificial sequence
  SiRNA target sequence
gctattggatatgtttgtggc

SEQ ID NO: 306941 - DNA, 21 bp, Artificial sequence
  SiRNA target sequence
ctattggatatgtttgtggca

SEQ ID NO: 306942 - DNA, 21 bp, Artificial sequence
  SiRNA target sequence
tattggatatgtttgtggcaa

SEQ ID NO: 306943 - DNA, 21 bp, Artificial sequence
  SiRNA target sequence
attggatatgtttgtggcaat

SEQ ID NO: 306944 - DNA, 21 bp, Artificial sequence
  SiRNA target sequence
ttggatatgtttgtggcaatc

SEQ ID NO: 306945 - DNA, 21 bp, Artificial sequence
  SiRNA target sequence
tggatatgtttgtggcaatcc

SEQ ID NO: 306946 - DNA, 21 bp, Artificial sequence
  SiRNA target sequence
ggatatgtttgtggcaatcca

SEQ ID NO: 306947 - DNA, 21 bp, Artificial sequence
  SiRNA target sequence
gatatgtttgtggcaatccag

SEQ ID NO: 306948 - DNA, 21 bp, Artificial sequence
  SiRNA target sequence
atatgtttgtggcaatccagc

SEQ ID NO: 306949 - DNA, 21 bp, Artificial sequence
  SiRNA target sequence
tatgtttgtggcaatccagct

SEQ ID NO: 306950 - DNA, 21 bp, Artificial sequence
  SiRNA target sequence
atgtttgtggcaatccagcta

SEQ ID NO: 306951 - DNA, 21 bp, Artificial sequence
  SiRNA target sequence
tgtttgtggcaatccagctat

SEQ ID NO: 306952 - DNA, 21 bp, Artificial sequence
  SiRNA target sequence
gtttgtggcaatccagctata

SEQ ID NO: 306953 - DNA, 21 bp, Artificial sequence
  SiRNA target sequence
tttgtggcaatccagctataa

SEQ ID NO: 306954 - DNA, 21 bp, Artificial sequence
  SiRNA target sequence
ttgtggcaatccagctataaa

SEQ ID NO: 306955 - DNA, 21 bp, Artificial sequence
  SiRNA target sequence
tgtggcaatccagctataaaa

SEQ ID NO: 306956 - DNA, 21 bp, Artificial sequence
  SiRNA target sequence
gtggcaatccagctataaaac

SEQ ID NO: 306957 - DNA, 21 bp, Artificial sequence
  SiRNA target sequence
tggcaatccagctataaaaca

SEQ ID NO: 306958 - DNA, 21 bp, Artificial sequence
  SiRNA target sequence
ggcaatccagctataaaacat

SEQ ID NO: 306959 - DNA, 21 bp, Artificial sequence
  SiRNA target sequence
gcaatccagctataaaacatg

SEQ ID NO: 306960 - DNA, 21 bp, Artificial sequence
  SiRNA target sequence
caatccagctataaaacatgt

SEQ ID NO: 306961 - DNA, 21 bp, Artificial sequence
  SiRNA target sequence
aatccagctataaaacatgtc

SEQ ID NO: 306962 - DNA, 21 bp, Artificial sequence
  SiRNA target sequence
atccagctataaaacatgtcc

SEQ ID NO: 306963 - DNA, 21 bp, Artificial sequence
  SiRNA target sequence
tccagctataaaacatgtcct

SEQ ID NO: 306964 - DNA, 21 bp, Artificial sequence
  SiRNA target sequence
ccagctataaaacatgtcctc

SEQ ID NO: 306965 - DNA, 21 bp, Artificial sequence
  SiRNA target sequence
cagctataaaacatgtcctca

SEQ ID NO: 306966 - DNA, 21 bp, Artificial sequence
  SiRNA target sequence
agctataaaacatgtcctcac

SEQ ID NO: 306967 - DNA, 21 bp, Artificial sequence
  SiRNA target sequence
gctataaaacatgtcctcacc

SEQ ID NO: 306968 - DNA, 21 bp, Artificial sequence
  SiRNA target sequence
ctataaaacatgtcctcacct

SEQ ID NO: 306969 - DNA, 21 bp, Artificial sequence
  SiRNA target sequence
tataaaacatgtcctcacctg

SEQ ID NO: 306970 - DNA, 21 bp, Artificial sequence
  SiRNA target sequence
ataaaacatgtcctcacctgg

SEQ ID NO: 306971 - DNA, 21 bp, Artificial sequence
  SiRNA target sequence
taaaacatgtcctcacctgga

SEQ ID NO: 306972 - DNA, 21 bp, Artificial sequence
  SiRNA target sequence
aaaacatgtcctcacctggag

SEQ ID NO: 306973 - DNA, 21 bp, Artificial sequence
  SiRNA target sequence
aaacatgtcctcacctggagt

SEQ ID NO: 306974 - DNA, 21 bp, Artificial sequence
  SiRNA target sequence
aacatgtcctcacctggagta

SEQ ID NO: 306975 - DNA, 21 bp, Artificial sequence
  SiRNA target sequence
acatgtcctcacctggagtac

SEQ ID NO: 306976 - DNA, 21 bp, Artificial sequence
  SiRNA target sequence
catgtcctcacctggagtacg

SEQ ID NO: 306977 - DNA, 21 bp, Artificial sequence
  SiRNA target sequence
atgtcctcacctggagtacga

SEQ ID NO: 306978 - DNA, 21 bp, Artificial sequence
  SiRNA target sequence
tgtcctcacctggagtacgac

SEQ ID NO: 306979 - DNA, 21 bp, Artificial sequence
  SiRNA target sequence
gtcctcacctggagtacgaca

SEQ ID NO: 306980 - DNA, 21 bp, Artificial sequence
  SiRNA target sequence
tcctcacctggagtacgacag

SEQ ID NO: 306981 - DNA, 21 bp, Artificial sequence
  SiRNA target sequence
cctcacctggagtacgacaga

SEQ ID NO: 306982 - DNA, 21 bp, Artificial sequence
  SiRNA target sequence
ctcacctggagtacgacagat

SEQ ID NO: 306983 - DNA, 21 bp, Artificial sequence
  SiRNA target sequence
tcacctggagtacgacagatg

SEQ ID NO: 306984 - DNA, 21 bp, Artificial sequence
  SiRNA target sequence
cacctggagtacgacagatgt

SEQ ID NO: 306985 - DNA, 21 bp, Artificial sequence
  SiRNA target sequence
acctggagtacgacagatgtg

SEQ ID NO: 306986 - DNA, 21 bp, Artificial sequence
  SiRNA target sequence
cctggagtacgacagatgtgg

SEQ ID NO: 306987 - DNA, 21 bp, Artificial sequence
  SiRNA target sequence
ctggagtacgacagatgtggt

SEQ ID NO: 306988 - DNA, 21 bp, Artificial sequence
  SiRNA target sequence
tggagtacgacagatgtggtt

SEQ ID NO: 306989 - DNA, 21 bp, Artificial sequence
  SiRNA target sequence
ggagtacgacagatgtggttc

SEQ ID NO: 306990 - DNA, 21 bp, Artificial sequence
  SiRNA target sequence
gagtacgacagatgtggttca

SEQ ID NO: 306991 - DNA, 21 bp, Artificial sequence
  SiRNA target sequence
agtacgacagatgtggttcaa

SEQ ID NO: 306992 - DNA, 21 bp, Artificial sequence
  SiRNA target sequence
gtacgacagatgtggttcaaa

SEQ ID NO: 306993 - DNA, 21 bp, Artificial sequence
  SiRNA target sequence
tacgacagatgtggttcaaaa

SEQ ID NO: 306994 - DNA, 21 bp, Artificial sequence
  SiRNA target sequence
acgacagatgtggttcaaaac

SEQ ID NO: 306995 - DNA, 21 bp, Artificial sequence
  SiRNA target sequence
cgacagatgtggttcaaaacc

SEQ ID NO: 306996 - DNA, 21 bp, Artificial sequence
  SiRNA target sequence
gacagatgtggttcaaaaccc

SEQ ID NO: 306997 - DNA, 21 bp, Artificial sequence
  SiRNA target sequence
acagatgtggttcaaaacccg

SEQ ID NO: 306998 - DNA, 21 bp, Artificial sequence
  SiRNA target sequence
cagatgtggttcaaaacccga

SEQ ID NO: 306999 - DNA, 21 bp, Artificial sequence
  SiRNA target sequence
agatgtggttcaaaacccgat

SEQ ID NO: 307000 - DNA, 21 bp, Artificial sequence
  SiRNA target sequence
gatgtggttcaaaacccgata

SEQ ID NO: 307001 - DNA, 21 bp, Artificial sequence
  SiRNA target sequence
atgtggttcaaaacccgataa

SEQ ID NO: 307002 - DNA, 21 bp, Artificial sequence
  SiRNA target sequence
tgtggttcaaaacccgataag

SEQ ID NO: 307003 - DNA, 21 bp, Artificial sequence
  SiRNA target sequence
gtggttcaaaacccgataagt

SEQ ID NO: 307004 - DNA, 21 bp, Artificial sequence
  SiRNA target sequence
tggttcaaaacccgataagta

SEQ ID NO: 307005 - DNA, 21 bp, Artificial sequence
  SiRNA target sequence
ggttcaaaacccgataagtaa

SEQ ID NO: 307006 - DNA, 21 bp, Artificial sequence
  SiRNA target sequence
gttcaaaacccgataagtaac

SEQ ID NO: 307007 - DNA, 21 bp, Artificial sequence
  SiRNA target sequence
ttcaaaacccgataagtaacg

SEQ ID NO: 307008 - DNA, 21 bp, Artificial sequence
  SiRNA target sequence
tcaaaacccgataagtaacgg

SEQ ID NO: 307009 - DNA, 21 bp, Artificial sequence
  SiRNA target sequence
caaaacccgataagtaacgga

SEQ ID NO: 307010 - DNA, 21 bp, Artificial sequence
  SiRNA target sequence
aaaacccgataagtaacggag

SEQ ID NO: 307011 - DNA, 21 bp, Artificial sequence
  SiRNA target sequence
aaacccgataagtaacggaga

SEQ ID NO: 307012 - DNA, 21 bp, Artificial sequence
  SiRNA target sequence
aacccgataagtaacggagat

SEQ ID NO: 307013 - DNA, 21 bp, Artificial sequence
  SiRNA target sequence
acccgataagtaacggagatg

SEQ ID NO: 307014 - DNA, 21 bp, Artificial sequence
  SiRNA target sequence
cccgataagtaacggagatga

SEQ ID NO: 307015 - DNA, 21 bp, Artificial sequence
  SiRNA target sequence
ccgataagtaacggagatgat

SEQ ID NO: 307016 - DNA, 21 bp, Artificial sequence
  SiRNA target sequence
cgataagtaacggagatgatt

SEQ ID NO: 307017 - DNA, 21 bp, Artificial sequence
  SiRNA target sequence
gataagtaacggagatgattg

SEQ ID NO: 307018 - DNA, 21 bp, Artificial sequence
  SiRNA target sequence
ataagtaacggagatgattgg

SEQ ID NO: 307019 - DNA, 21 bp, Artificial sequence
  SiRNA target sequence
taagtaacggagatgattggg

SEQ ID NO: 307020 - DNA, 21 bp, Artificial sequence
  SiRNA target sequence
aagtaacggagatgattgggg

SEQ ID NO: 307021 - DNA, 21 bp, Artificial sequence
  SiRNA target sequence
agtaacggagatgattggggc

SEQ ID NO: 307022 - DNA, 21 bp, Artificial sequence
  SiRNA target sequence
gtaacggagatgattggggcg

SEQ ID NO: 307023 - DNA, 21 bp, Artificial sequence
  SiRNA target sequence
taacggagatgattggggcgg

SEQ ID NO: 307024 - DNA, 21 bp, Artificial sequence
  SiRNA target sequence
aacggagatgattggggcggt

SEQ ID NO: 307025 - DNA, 21 bp, Artificial sequence
  SiRNA target sequence
acggagatgattggggcggtg

SEQ ID NO: 307026 - DNA, 21 bp, Artificial sequence
  SiRNA target sequence
cggagatgattggggcggtgt

SEQ ID NO: 307027 - DNA, 21 bp, Artificial sequence
  SiRNA target sequence
ggagatgattggggcggtgta

SEQ ID NO: 307028 - DNA, 21 bp, Artificial sequence
  SiRNA target sequence
gagatgattggggcggtgtaa

SEQ ID NO: 307029 - DNA, 21 bp, Artificial sequence
  SiRNA target sequence
agatgattggggcggtgtaat

SEQ ID NO: 307030 - DNA, 21 bp, Artificial sequence
  SiRNA target sequence
gatgattggggcggtgtaata

SEQ ID NO: 307031 - DNA, 21 bp, Artificial sequence
  SiRNA target sequence
atgattggggcggtgtaatac

SEQ ID NO: 307032 - DNA, 21 bp, Artificial sequence
  SiRNA target sequence
tgattggggcggtgtaatacc

SEQ ID NO: 307033 - DNA, 21 bp, Artificial sequence
  SiRNA target sequence
gattggggcggtgtaatacca

SEQ ID NO: 307034 - DNA, 21 bp, Artificial sequence
  SiRNA target sequence
attggggcggtgtaataccag

SEQ ID NO: 307035 - DNA, 21 bp, Artificial sequence
  SiRNA target sequence
ttggggcggtgtaataccagt

SEQ ID NO: 307036 - DNA, 21 bp, Artificial sequence
  SiRNA target sequence
tggggcggtgtaataccagtg

SEQ ID NO: 307037 - DNA, 21 bp, Artificial sequence
  SiRNA target sequence
ggggcggtgtaataccagtgg

SEQ ID NO: 307038 - DNA, 21 bp, Artificial sequence
  SiRNA target sequence
gggcggtgtaataccagtggg

SEQ ID NO: 307039 - DNA, 21 bp, Artificial sequence
  SiRNA target sequence
ggcggtgtaataccagtggga

SEQ ID NO: 307040 - DNA, 21 bp, Artificial sequence
  SiRNA target sequence
gcggtgtaataccagtgggaa

SEQ ID NO: 307041 - DNA, 21 bp, Artificial sequence
  SiRNA target sequence
cggtgtaataccagtgggaat

SEQ ID NO: 307042 - DNA, 21 bp, Artificial sequence
  SiRNA target sequence
ggtgtaataccagtgggaatg

SEQ ID NO: 307043 - DNA, 21 bp, Artificial sequence
  SiRNA target sequence
gtgtaataccagtgggaatgc

SEQ ID NO: 307044 - DNA, 21 bp, Artificial sequence
  SiRNA target sequence
tgtaataccagtgggaatgcc

SEQ ID NO: 307045 - DNA, 21 bp, Artificial sequence
  SiRNA target sequence
gtaataccagtgggaatgcct

SEQ ID NO: 307046 - DNA, 21 bp, Artificial sequence
  SiRNA target sequence
taataccagtgggaatgcctt

SEQ ID NO: 307047 - DNA, 21 bp, Artificial sequence
  SiRNA target sequence
aataccagtgggaatgccttg

SEQ ID NO: 307048 - DNA, 21 bp, Artificial sequence
  SiRNA target sequence
ataccagtgggaatgccttgc

SEQ ID NO: 307049 - DNA, 21 bp, Artificial sequence
  SiRNA target sequence
taccagtgggaatgccttgct

SEQ ID NO: 307050 - DNA, 21 bp, Artificial sequence
  SiRNA target sequence
accagtgggaatgccttgcta

SEQ ID NO: 307051 - DNA, 21 bp, Artificial sequence
  SiRNA target sequence
ccagtgggaatgccttgctac

SEQ ID NO: 307052 - DNA, 21 bp, Artificial sequence
  SiRNA target sequence
cagtgggaatgccttgctact

SEQ ID NO: 307053 - DNA, 21 bp, Artificial sequence
  SiRNA target sequence
agtgggaatgccttgctactc

SEQ ID NO: 307054 - DNA, 21 bp, Artificial sequence
  SiRNA target sequence
gtgggaatgccttgctactct

SEQ ID NO: 307055 - DNA, 21 bp, Artificial sequence
  SiRNA target sequence
tgggaatgccttgctactcta

SEQ ID NO: 307056 - DNA, 21 bp, Artificial sequence
  SiRNA target sequence
gggaatgccttgctactctaa

SEQ ID NO: 307057 - DNA, 21 bp, Artificial sequence
  SiRNA target sequence
ggaatgccttgctactctaag

SEQ ID NO: 307058 - DNA, 21 bp, Artificial sequence
  SiRNA target sequence
gaatgccttgctactctaaga

SEQ ID NO: 307059 - DNA, 21 bp, Artificial sequence
  SiRNA target sequence
aatgccttgctactctaagac

SEQ ID NO: 307060 - DNA, 21 bp, Artificial sequence
  SiRNA target sequence
atgccttgctactctaagact

SEQ ID NO: 307061 - DNA, 21 bp, Artificial sequence
  SiRNA target sequence
tgccttgctactctaagacta

SEQ ID NO: 307062 - DNA, 21 bp, Artificial sequence
  SiRNA target sequence
gccttgctactctaagactat

SEQ ID NO: 307063 - DNA, 21 bp, Artificial sequence
  SiRNA target sequence
ccttgctactctaagactatt

SEQ ID NO: 307064 - DNA, 21 bp, Artificial sequence
  SiRNA target sequence
cttgctactctaagactatta

SEQ ID NO: 307065 - DNA, 21 bp, Artificial sequence
  SiRNA target sequence
ttgctactctaagactattag

SEQ ID NO: 307066 - DNA, 21 bp, Artificial sequence
  SiRNA target sequence
tgctactctaagactattaga

SEQ ID NO: 307067 - DNA, 21 bp, Artificial sequence
  SiRNA target sequence
gctactctaagactattagag

SEQ ID NO: 307068 - DNA, 21 bp, Artificial sequence
  SiRNA target sequence
ctactctaagactattagagc

SEQ ID NO: 307069 - DNA, 21 bp, Artificial sequence
  SiRNA target sequence
tactctaagactattagagca

SEQ ID NO: 307070 - DNA, 21 bp, Artificial sequence
  SiRNA target sequence
actctaagactattagagcag

SEQ ID NO: 307071 - DNA, 21 bp, Artificial sequence
  SiRNA target sequence
ctctaagactattagagcagt

SEQ ID NO: 307072 - DNA, 21 bp, Artificial sequence
  SiRNA target sequence
tctaagactattagagcagtt

SEQ ID NO: 307073 - DNA, 21 bp, Artificial sequence
  SiRNA target sequence
ctaagactattagagcagtta

SEQ ID NO: 307074 - DNA, 21 bp, Artificial sequence
  SiRNA target sequence
taagactattagagcagttaa

SEQ ID NO: 307075 - DNA, 21 bp, Artificial sequence
  SiRNA target sequence
aagactattagagcagttaaa

SEQ ID NO: 307076 - DNA, 21 bp, Artificial sequence
  SiRNA target sequence
agactattagagcagttaaag

SEQ ID NO: 307077 - DNA, 21 bp, Artificial sequence
  SiRNA target sequence
gactattagagcagttaaagg

SEQ ID NO: 307078 - DNA, 21 bp, Artificial sequence
  SiRNA target sequence
actattagagcagttaaaggc

SEQ ID NO: 307079 - DNA, 21 bp, Artificial sequence
  SiRNA target sequence
ctattagagcagttaaaggcg

SEQ ID NO: 307080 - DNA, 21 bp, Artificial sequence
  SiRNA target sequence
tattagagcagttaaaggcgc

SEQ ID NO: 307081 - DNA, 21 bp, Artificial sequence
  SiRNA target sequence
attagagcagttaaaggcgcc

SEQ ID NO: 307082 - DNA, 21 bp, Artificial sequence
  SiRNA target sequence
ttagagcagttaaaggcgcca

SEQ ID NO: 307083 - DNA, 21 bp, Artificial sequence
  SiRNA target sequence
tagagcagttaaaggcgccac

SEQ ID NO: 307084 - DNA, 21 bp, Artificial sequence
  SiRNA target sequence
agagcagttaaaggcgccact

SEQ ID NO: 307085 - DNA, 21 bp, Artificial sequence
  SiRNA target sequence
gagcagttaaaggcgccactt

SEQ ID NO: 307086 - DNA, 21 bp, Artificial sequence
  SiRNA target sequence
agcagttaaaggcgccacttc

SEQ ID NO: 307087 - DNA, 21 bp, Artificial sequence
  SiRNA target sequence
gcagttaaaggcgccacttcg

SEQ ID NO: 307088 - DNA, 21 bp, Artificial sequence
  SiRNA target sequence
cagttaaaggcgccacttcga

SEQ ID NO: 307089 - DNA, 21 bp, Artificial sequence
  SiRNA target sequence
agttaaaggcgccacttcgac

SEQ ID NO: 307090 - DNA, 21 bp, Artificial sequence
  SiRNA target sequence
gttaaaggcgccacttcgacg

SEQ ID NO: 307091 - DNA, 21 bp, Artificial sequence
  SiRNA target sequence
ttaaaggcgccacttcgacgt

SEQ ID NO: 307092 - DNA, 21 bp, Artificial sequence
  SiRNA target sequence
taaaggcgccacttcgacgtc

SEQ ID NO: 307093 - DNA, 21 bp, Artificial sequence
  SiRNA target sequence
aaaggcgccacttcgacgtca

SEQ ID NO: 307094 - DNA, 21 bp, Artificial sequence
  SiRNA target sequence
aaggcgccacttcgacgtcaa

SEQ ID NO: 307095 - DNA, 21 bp, Artificial sequence
  SiRNA target sequence
aggcgccacttcgacgtcaaa

SEQ ID NO: 307096 - DNA, 21 bp, Artificial sequence
  SiRNA target sequence
ggcgccacttcgacgtcaaaa

SEQ ID NO: 307097 - DNA, 21 bp, Artificial sequence
  SiRNA target sequence
gcgccacttcgacgtcaaaaa

SEQ ID NO: 307098 - DNA, 21 bp, Artificial sequence
  SiRNA target sequence
cgccacttcgacgtcaaaaac

SEQ ID NO: 307099 - DNA, 21 bp, Artificial sequence
  SiRNA target sequence
gccacttcgacgtcaaaaacc

SEQ ID NO: 307100 - DNA, 21 bp, Artificial sequence
  SiRNA target sequence
ccacttcgacgtcaaaaaccg

SEQ ID NO: 307101 - DNA, 21 bp, Artificial sequence
  SiRNA target sequence
cacttcgacgtcaaaaaccga

SEQ ID NO: 307102 - DNA, 21 bp, Artificial sequence
  SiRNA target sequence
acttcgacgtcaaaaaccgaa

SEQ ID NO: 307103 - DNA, 21 bp, Artificial sequence
  SiRNA target sequence
cttcgacgtcaaaaaccgaag

SEQ ID NO: 307104 - DNA, 21 bp, Artificial sequence
  SiRNA target sequence
ttcgacgtcaaaaaccgaagt

SEQ ID NO: 307105 - DNA, 21 bp, Artificial sequence
  SiRNA target sequence
tcgacgtcaaaaaccgaagtg

SEQ ID NO: 307106 - DNA, 21 bp, Artificial sequence
  SiRNA target sequence
cgacgtcaaaaaccgaagtga

SEQ ID NO: 307107 - DNA, 21 bp, Artificial sequence
  SiRNA target sequence
gacgtcaaaaaccgaagtgat

SEQ ID NO: 307108 - DNA, 21 bp, Artificial sequence
  SiRNA target sequence
acgtcaaaaaccgaagtgatg

SEQ ID NO: 307109 - DNA, 21 bp, Artificial sequence
  SiRNA target sequence
cgtcaaaaaccgaagtgatgg

SEQ ID NO: 307110 - DNA, 21 bp, Artificial sequence
  SiRNA target sequence
gtcaaaaaccgaagtgatgga

SEQ ID NO: 307111 - DNA, 21 bp, Artificial sequence
  SiRNA target sequence
tcaaaaaccgaagtgatggac

SEQ ID NO: 307112 - DNA, 21 bp, Artificial sequence
  SiRNA target sequence
caaaaaccgaagtgatggacc

SEQ ID NO: 307113 - DNA, 21 bp, Artificial sequence
  SiRNA target sequence
aaaaaccgaagtgatggaccc

SEQ ID NO: 307114 - DNA, 21 bp, Artificial sequence
  SiRNA target sequence
aaaaccgaagtgatggaccca

SEQ ID NO: 307115 - DNA, 21 bp, Artificial sequence
  SiRNA target sequence
aaaccgaagtgatggacccag

SEQ ID NO: 307116 - DNA, 21 bp, Artificial sequence
  SiRNA target sequence
aaccgaagtgatggacccagc

SEQ ID NO: 307117 - DNA, 21 bp, Artificial sequence
  SiRNA target sequence
accgaagtgatggacccagca

SEQ ID NO: 307118 - DNA, 21 bp, Artificial sequence
  SiRNA target sequence
ccgaagtgatggacccagcac

SEQ ID NO: 307119 - DNA, 21 bp, Artificial sequence
  SiRNA target sequence
cgaagtgatggacccagcacc

SEQ ID NO: 307120 - DNA, 21 bp, Artificial sequence
  SiRNA target sequence
gaagtgatggacccagcaccg

SEQ ID NO: 307121 - DNA, 21 bp, Artificial sequence
  SiRNA target sequence
aagtgatggacccagcaccgt

SEQ ID NO: 307122 - DNA, 21 bp, Artificial sequence
  SiRNA target sequence
agtgatggacccagcaccgtg

SEQ ID NO: 307123 - DNA, 21 bp, Artificial sequence
  SiRNA target sequence
gtgatggacccagcaccgtgt

SEQ ID NO: 307124 - DNA, 21 bp, Artificial sequence
  SiRNA target sequence
tgatggacccagcaccgtgtg

SEQ ID NO: 307125 - DNA, 21 bp, Artificial sequence
  SiRNA target sequence
gatggacccagcaccgtgtga

SEQ ID NO: 307126 - DNA, 21 bp, Artificial sequence
  SiRNA target sequence
atggacccagcaccgtgtgaa

SEQ ID NO: 307127 - DNA, 21 bp, Artificial sequence
  SiRNA target sequence
tggacccagcaccgtgtgaat

SEQ ID NO: 307128 - DNA, 21 bp, Artificial sequence
  SiRNA target sequence
ggacccagcaccgtgtgaata

SEQ ID NO: 307129 - DNA, 21 bp, Artificial sequence
  SiRNA target sequence
gacccagcaccgtgtgaatat

SEQ ID NO: 307130 - DNA, 21 bp, Artificial sequence
  SiRNA target sequence
acccagcaccgtgtgaatatg

SEQ ID NO: 307131 - DNA, 21 bp, Artificial sequence
  SiRNA target sequence
cccagcaccgtgtgaatatgt

SEQ ID NO: 307132 - DNA, 21 bp, Artificial sequence
  SiRNA target sequence
ccagcaccgtgtgaatatgtt

SEQ ID NO: 307133 - DNA, 21 bp, Artificial sequence
  SiRNA target sequence
cagcaccgtgtgaatatgttg

SEQ ID NO: 307134 - DNA, 21 bp, Artificial sequence
  SiRNA target sequence
agcaccgtgtgaatatgttgc

SEQ ID NO: 307135 - DNA, 21 bp, Artificial sequence
  SiRNA target sequence
gcaccgtgtgaatatgttgca

SEQ ID NO: 307136 - DNA, 21 bp, Artificial sequence
  SiRNA target sequence
caccgtgtgaatatgttgcaa

SEQ ID NO: 307137 - DNA, 21 bp, Artificial sequence
  SiRNA target sequence
accgtgtgaatatgttgcaaa

SEQ ID NO: 307138 - DNA, 21 bp, Artificial sequence
  SiRNA target sequence
ccgtgtgaatatgttgcaaat

SEQ ID NO: 307139 - DNA, 21 bp, Artificial sequence
  SiRNA target sequence
cgtgtgaatatgttgcaaatc

SEQ ID NO: 307140 - DNA, 21 bp, Artificial sequence
  SiRNA target sequence
gtgtgaatatgttgcaaatct

SEQ ID NO: 307141 - DNA, 21 bp, Artificial sequence
  SiRNA target sequence
tgtgaatatgttgcaaatctt

SEQ ID NO: 307142 - DNA, 21 bp, Artificial sequence
  SiRNA target sequence
gtgaatatgttgcaaatcttt

SEQ ID NO: 307143 - DNA, 21 bp, Artificial sequence
  SiRNA target sequence
tgaatatgttgcaaatctttt

SEQ ID NO: 307144 - DNA, 21 bp, Artificial sequence
  SiRNA target sequence
gaatatgttgcaaatcttttc

SEQ ID NO: 307145 - DNA, 21 bp, Artificial sequence
  SiRNA target sequence
aatatgttgcaaatcttttct

SEQ ID NO: 307146 - DNA, 21 bp, Artificial sequence
  SiRNA target sequence
atatgttgcaaatcttttctc

SEQ ID NO: 307147 - DNA, 21 bp, Artificial sequence
  SiRNA target sequence
tatgttgcaaatcttttctca

SEQ ID NO: 307148 - DNA, 21 bp, Artificial sequence
  SiRNA target sequence
atgttgcaaatcttttctcat

SEQ ID NO: 307149 - DNA, 21 bp, Artificial sequence
  SiRNA target sequence
tgttgcaaatcttttctcata

SEQ ID NO: 307150 - DNA, 21 bp, Artificial sequence
  SiRNA target sequence
gttgcaaatcttttctcatat

SEQ ID NO: 307151 - DNA, 21 bp, Artificial sequence
  SiRNA target sequence
ttgcaaatcttttctcatatt

SEQ ID NO: 307152 - DNA, 21 bp, Artificial sequence
  SiRNA target sequence
tgcaaatcttttctcatattg

SEQ ID NO: 307153 - DNA, 21 bp, Artificial sequence
  SiRNA target sequence
gcaaatcttttctcatattgg

SEQ ID NO: 307154 - DNA, 21 bp, Artificial sequence
  SiRNA target sequence
caaatcttttctcatattggc

SEQ ID NO: 307155 - DNA, 21 bp, Artificial sequence
  SiRNA target sequence
aaatcttttctcatattggcg

SEQ ID NO: 307156 - DNA, 21 bp, Artificial sequence
  SiRNA target sequence
aatcttttctcatattggcgt

SEQ ID NO: 307157 - DNA, 21 bp, Artificial sequence
  SiRNA target sequence
atcttttctcatattggcgtg

SEQ ID NO: 307158 - DNA, 21 bp, Artificial sequence
  SiRNA target sequence
tcttttctcatattggcgtgc

SEQ ID NO: 307159 - DNA, 21 bp, Artificial sequence
  SiRNA target sequence
cttttctcatattggcgtgca

SEQ ID NO: 307160 - DNA, 21 bp, Artificial sequence
  SiRNA target sequence
ttttctcatattggcgtgcaa

SEQ ID NO: 307161 - DNA, 21 bp, Artificial sequence
  SiRNA target sequence
tttctcatattggcgtgcaac

SEQ ID NO: 307162 - DNA, 21 bp, Artificial sequence
  SiRNA target sequence
ttctcatattggcgtgcaact

SEQ ID NO: 307163 - DNA, 21 bp, Artificial sequence
  SiRNA target sequence
tctcatattggcgtgcaacta

SEQ ID NO: 307164 - DNA, 21 bp, Artificial sequence
  SiRNA target sequence
ctcatattggcgtgcaactat

SEQ ID NO: 307165 - DNA, 21 bp, Artificial sequence
  SiRNA target sequence
tcatattggcgtgcaactatg

SEQ ID NO: 307166 - DNA, 21 bp, Artificial sequence
  SiRNA target sequence
catattggcgtgcaactatgt

SEQ ID NO: 307167 - DNA, 21 bp, Artificial sequence
  SiRNA target sequence
atattggcgtgcaactatgtg

SEQ ID NO: 307168 - DNA, 21 bp, Artificial sequence
  SiRNA target sequence
tattggcgtgcaactatgtgc

SEQ ID NO: 307169 - DNA, 21 bp, Artificial sequence
  SiRNA target sequence
attggcgtgcaactatgtgct

SEQ ID NO: 307170 - DNA, 21 bp, Artificial sequence
  SiRNA target sequence
ttggcgtgcaactatgtgcta

SEQ ID NO: 307171 - DNA, 21 bp, Artificial sequence
  SiRNA target sequence
tggcgtgcaactatgtgctat

SEQ ID NO: 307172 - DNA, 21 bp, Artificial sequence
  SiRNA target sequence
ggcgtgcaactatgtgctatc

SEQ ID NO: 307173 - DNA, 21 bp, Artificial sequence
  SiRNA target sequence
gcgtgcaactatgtgctatcg

SEQ ID NO: 307174 - DNA, 21 bp, Artificial sequence
  SiRNA target sequence
cgtgcaactatgtgctatcgt

SEQ ID NO: 307175 - DNA, 21 bp, Artificial sequence
  SiRNA target sequence
gtgcaactatgtgctatcgta

SEQ ID NO: 307176 - DNA, 21 bp, Artificial sequence
  SiRNA target sequence
tgcaactatgtgctatcgtat

SEQ ID NO: 307177 - DNA, 21 bp, Artificial sequence
  SiRNA target sequence
gcaactatgtgctatcgtatt

SEQ ID NO: 307178 - DNA, 21 bp, Artificial sequence
  SiRNA target sequence
caactatgtgctatcgtatta

SEQ ID NO: 307179 - DNA, 21 bp, Artificial sequence
  SiRNA target sequence
aactatgtgctatcgtattac

SEQ ID NO: 307180 - DNA, 21 bp, Artificial sequence
  SiRNA target sequence
actatgtgctatcgtattacg

SEQ ID NO: 307181 - DNA, 21 bp, Artificial sequence
  SiRNA target sequence
ctatgtgctatcgtattacgg

SEQ ID NO: 307182 - DNA, 21 bp, Artificial sequence
  SiRNA target sequence
tatgtgctatcgtattacggt

SEQ ID NO: 307183 - DNA, 21 bp, Artificial sequence
  SiRNA target sequence
atgtgctatcgtattacggta

SEQ ID NO: 307184 - DNA, 21 bp, Artificial sequence
  SiRNA target sequence
tgtgctatcgtattacggtag

SEQ ID NO: 307185 - DNA, 21 bp, Artificial sequence
  SiRNA target sequence
gtgctatcgtattacggtagt

SEQ ID NO: 307186 - DNA, 21 bp, Artificial sequence
  SiRNA target sequence
tgctatcgtattacggtagta

SEQ ID NO: 307187 - DNA, 21 bp, Artificial sequence
  SiRNA target sequence
gctatcgtattacggtagtaa

SEQ ID NO: 307188 - DNA, 21 bp, Artificial sequence
  SiRNA target sequence
ctatcgtattacggtagtaaa

SEQ ID NO: 307189 - DNA, 21 bp, Artificial sequence
  SiRNA target sequence
tatcgtattacggtagtaaag

SEQ ID NO: 307190 - DNA, 21 bp, Artificial sequence
  SiRNA target sequence
atcgtattacggtagtaaaga

SEQ ID NO: 307191 - DNA, 21 bp, Artificial sequence
  SiRNA target sequence
tcgtattacggtagtaaagac

SEQ ID NO: 307192 - DNA, 21 bp, Artificial sequence
  SiRNA target sequence
cgtattacggtagtaaagaca

SEQ ID NO: 307193 - DNA, 21 bp, Artificial sequence
  SiRNA target sequence
gtattacggtagtaaagacag

SEQ ID NO: 307194 - DNA, 21 bp, Artificial sequence
  SiRNA target sequence
tattacggtagtaaagacagc

SEQ ID NO: 307195 - DNA, 21 bp, Artificial sequence
  SiRNA target sequence
attacggtagtaaagacagct

SEQ ID NO: 307196 - DNA, 21 bp, Artificial sequence
  SiRNA target sequence
ttacggtagtaaagacagctt

SEQ ID NO: 307197 - DNA, 21 bp, Artificial sequence
  SiRNA target sequence
tacggtagtaaagacagcttt

SEQ ID NO: 307198 - DNA, 21 bp, Artificial sequence
  SiRNA target sequence
acggtagtaaagacagctttt

SEQ ID NO: 307199 - DNA, 21 bp, Artificial sequence
  SiRNA target sequence
cggtagtaaagacagcttttc

SEQ ID NO: 307200 - DNA, 21 bp, Artificial sequence
  SiRNA target sequence
ggtagtaaagacagcttttca

SEQ ID NO: 307201 - DNA, 21 bp, Artificial sequence
  SiRNA target sequence
gtagtaaagacagcttttcac

SEQ ID NO: 307202 - DNA, 21 bp, Artificial sequence
  SiRNA target sequence
tagtaaagacagcttttcaca

SEQ ID NO: 307203 - DNA, 21 bp, Artificial sequence
  SiRNA target sequence
agtaaagacagcttttcacac

SEQ ID NO: 307204 - DNA, 21 bp, Artificial sequence
  SiRNA target sequence
gtaaagacagcttttcacaca

SEQ ID NO: 307205 - DNA, 21 bp, Artificial sequence
  SiRNA target sequence
taaagacagcttttcacacag

SEQ ID NO: 307206 - DNA, 21 bp, Artificial sequence
  SiRNA target sequence
aaagacagcttttcacacagg

SEQ ID NO: 307207 - DNA, 21 bp, Artificial sequence
  SiRNA target sequence
aagacagcttttcacacaggc

SEQ ID NO: 307208 - DNA, 21 bp, Artificial sequence
  SiRNA target sequence
agacagcttttcacacaggca

SEQ ID NO: 307209 - DNA, 21 bp, Artificial sequence
  SiRNA target sequence
gacagcttttcacacaggcag

SEQ ID NO: 307210 - DNA, 21 bp, Artificial sequence
  SiRNA target sequence
acagcttttcacacaggcagg

SEQ ID NO: 307211 - DNA, 21 bp, Artificial sequence
  SiRNA target sequence
cagcttttcacacaggcaggt

SEQ ID NO: 307212 - DNA, 21 bp, Artificial sequence
  SiRNA target sequence
agcttttcacacaggcaggtt

SEQ ID NO: 307213 - DNA, 21 bp, Artificial sequence
  SiRNA target sequence
gcttttcacacaggcaggttg

SEQ ID NO: 307214 - DNA, 21 bp, Artificial sequence
  SiRNA target sequence
cttttcacacaggcaggttgg

SEQ ID NO: 307215 - DNA, 21 bp, Artificial sequence
  SiRNA target sequence
ttttcacacaggcaggttgga

SEQ ID NO: 307216 - DNA, 21 bp, Artificial sequence
  SiRNA target sequence
tttcacacaggcaggttggaa

SEQ ID NO: 307217 - DNA, 21 bp, Artificial sequence
  SiRNA target sequence
ttcacacaggcaggttggaaa

SEQ ID NO: 307218 - DNA, 21 bp, Artificial sequence
  SiRNA target sequence
tcacacaggcaggttggaaat

SEQ ID NO: 307219 - DNA, 21 bp, Artificial sequence
  SiRNA target sequence
cacacaggcaggttggaaatc

SEQ ID NO: 307220 - DNA, 21 bp, Artificial sequence
  SiRNA target sequence
acacaggcaggttggaaatct

SEQ ID NO: 307221 - DNA, 21 bp, Artificial sequence
  SiRNA target sequence
cacaggcaggttggaaatctt

SEQ ID NO: 307222 - DNA, 21 bp, Artificial sequence
  SiRNA target sequence
acaggcaggttggaaatcttc

SEQ ID NO: 307223 - DNA, 21 bp, Artificial sequence
  SiRNA target sequence
caggcaggttggaaatcttct

SEQ ID NO: 307224 - DNA, 21 bp, Artificial sequence
  SiRNA target sequence
aggcaggttggaaatcttctt

SEQ ID NO: 307225 - DNA, 21 bp, Artificial sequence
  SiRNA target sequence
ggcaggttggaaatcttcttt

SEQ ID NO: 307226 - DNA, 21 bp, Artificial sequence
  SiRNA target sequence
gcaggttggaaatcttctttg

SEQ ID NO: 307227 - DNA, 21 bp, Artificial sequence
  SiRNA target sequence
caggttggaaatcttctttga

SEQ ID NO: 307228 - DNA, 21 bp, Artificial sequence
  SiRNA target sequence
aggttggaaatcttctttgaa

SEQ ID NO: 307229 - DNA, 21 bp, Artificial sequence
  SiRNA target sequence
ggttggaaatcttctttgaac

SEQ ID NO: 307230 - DNA, 21 bp, Artificial sequence
  SiRNA target sequence
gttggaaatcttctttgaacc

SEQ ID NO: 307231 - DNA, 21 bp, Artificial sequence
  SiRNA target sequence
ttggaaatcttctttgaacca

SEQ ID NO: 307232 - DNA, 21 bp, Artificial sequence
  SiRNA target sequence
tggaaatcttctttgaaccag

SEQ ID NO: 307233 - DNA, 21 bp, Artificial sequence
  SiRNA target sequence
ggaaatcttctttgaaccagg

SEQ ID NO: 307234 - DNA, 21 bp, Artificial sequence
  SiRNA target sequence
gaaatcttctttgaaccagga

SEQ ID NO: 307235 - DNA, 21 bp, Artificial sequence
  SiRNA target sequence
aaatcttctttgaaccaggaa

SEQ ID NO: 307236 - DNA, 21 bp, Artificial sequence
  SiRNA target sequence
aatcttctttgaaccaggaag

SEQ ID NO: 307237 - DNA, 21 bp, Artificial sequence
  SiRNA target sequence
atcttctttgaaccaggaagt

SEQ ID NO: 307238 - DNA, 21 bp, Artificial sequence
  SiRNA target sequence
tcttctttgaaccaggaagta

SEQ ID NO: 307239 - DNA, 21 bp, Artificial sequence
  SiRNA target sequence
cttctttgaaccaggaagtat

SEQ ID NO: 307240 - DNA, 21 bp, Artificial sequence
  SiRNA target sequence
ttctttgaaccaggaagtatt

SEQ ID NO: 307241 - DNA, 21 bp, Artificial sequence
  SiRNA target sequence
tctttgaaccaggaagtattc

SEQ ID NO: 307242 - DNA, 21 bp, Artificial sequence
  SiRNA target sequence
ctttgaaccaggaagtattcc

SEQ ID NO: 307243 - DNA, 21 bp, Artificial sequence
  SiRNA target sequence
tttgaaccaggaagtattccc

SEQ ID NO: 307244 - DNA, 21 bp, Artificial sequence
  SiRNA target sequence
ttgaaccaggaagtattccca

SEQ ID NO: 307245 - DNA, 21 bp, Artificial sequence
  SiRNA target sequence
tgaaccaggaagtattcccac

SEQ ID NO: 307246 - DNA, 21 bp, Artificial sequence
  SiRNA target sequence
gaaccaggaagtattcccacg

SEQ ID NO: 307247 - DNA, 21 bp, Artificial sequence
  SiRNA target sequence
aaccaggaagtattcccacgg

SEQ ID NO: 307248 - DNA, 21 bp, Artificial sequence
  SiRNA target sequence
accaggaagtattcccacggt

SEQ ID NO: 307249 - DNA, 21 bp, Artificial sequence
  SiRNA target sequence
ccaggaagtattcccacggta

SEQ ID NO: 307250 - DNA, 21 bp, Artificial sequence
  SiRNA target sequence
caggaagtattcccacggtaa

SEQ ID NO: 307251 - DNA, 21 bp, Artificial sequence
  SiRNA target sequence
aggaagtattcccacggtaag

SEQ ID NO: 307252 - DNA, 21 bp, Artificial sequence
  SiRNA target sequence
ggaagtattcccacggtaaga

SEQ ID NO: 307253 - DNA, 21 bp, Artificial sequence
  SiRNA target sequence
gaagtattcccacggtaagaa

SEQ ID NO: 307254 - DNA, 21 bp, Artificial sequence
  SiRNA target sequence
aagtattcccacggtaagaac

SEQ ID NO: 307255 - DNA, 21 bp, Artificial sequence
  SiRNA target sequence
agtattcccacggtaagaacc

SEQ ID NO: 307256 - DNA, 21 bp, Artificial sequence
  SiRNA target sequence
gtattcccacggtaagaaccg

SEQ ID NO: 307257 - DNA, 21 bp, Artificial sequence
  SiRNA target sequence
tattcccacggtaagaaccgc

SEQ ID NO: 307258 - DNA, 21 bp, Artificial sequence
  SiRNA target sequence
attcccacggtaagaaccgca

SEQ ID NO: 307259 - DNA, 21 bp, Artificial sequence
  SiRNA target sequence
ttcccacggtaagaaccgcag

SEQ ID NO: 307260 - DNA, 21 bp, Artificial sequence
  SiRNA target sequence
tcccacggtaagaaccgcaga

SEQ ID NO: 307261 - DNA, 21 bp, Artificial sequence
  SiRNA target sequence
cccacggtaagaaccgcagat

SEQ ID NO: 307262 - DNA, 21 bp, Artificial sequence
  SiRNA target sequence
ccacggtaagaaccgcagata

SEQ ID NO: 307263 - DNA, 21 bp, Artificial sequence
  SiRNA target sequence
cacggtaagaaccgcagataa

SEQ ID NO: 307264 - DNA, 21 bp, Artificial sequence
  SiRNA target sequence
acggtaagaaccgcagataac

SEQ ID NO: 307265 - DNA, 21 bp, Artificial sequence
  SiRNA target sequence
cggtaagaaccgcagataact

SEQ ID NO: 307266 - DNA, 21 bp, Artificial sequence
  SiRNA target sequence
ggtaagaaccgcagataactt

SEQ ID NO: 307267 - DNA, 21 bp, Artificial sequence
  SiRNA target sequence
gtaagaaccgcagataactta

SEQ ID NO: 307268 - DNA, 21 bp, Artificial sequence
  SiRNA target sequence
taagaaccgcagataacttag

SEQ ID NO: 307269 - DNA, 21 bp, Artificial sequence
  SiRNA target sequence
aagaaccgcagataacttagg

SEQ ID NO: 307270 - DNA, 21 bp, Artificial sequence
  SiRNA target sequence
agaaccgcagataacttagga

SEQ ID NO: 307271 - DNA, 21 bp, Artificial sequence
  SiRNA target sequence
gaaccgcagataacttaggac

SEQ ID NO: 307272 - DNA, 21 bp, Artificial sequence
  SiRNA target sequence
aaccgcagataacttaggacc

SEQ ID NO: 307273 - DNA, 21 bp, Artificial sequence
  SiRNA target sequence
accgcagataacttaggacca

SEQ ID NO: 307274 - DNA, 21 bp, Artificial sequence
  SiRNA target sequence
ccgcagataacttaggaccag

SEQ ID NO: 307275 - DNA, 21 bp, Artificial sequence
  SiRNA target sequence
cgcagataacttaggaccaga

SEQ ID NO: 307276 - DNA, 21 bp, Artificial sequence
  SiRNA target sequence
gcagataacttaggaccagat

SEQ ID NO: 307277 - DNA, 21 bp, Artificial sequence
  SiRNA target sequence
cagataacttaggaccagatc

SEQ ID NO: 307278 - DNA, 21 bp, Artificial sequence
  SiRNA target sequence
agataacttaggaccagatca

SEQ ID NO: 307279 - DNA, 21 bp, Artificial sequence
  SiRNA target sequence
gataacttaggaccagatcag

SEQ ID NO: 307280 - DNA, 21 bp, Artificial sequence
  SiRNA target sequence
ataacttaggaccagatcaga

SEQ ID NO: 307281 - DNA, 21 bp, Artificial sequence
  SiRNA target sequence
taacttaggaccagatcagac

SEQ ID NO: 307282 - DNA, 21 bp, Artificial sequence
  SiRNA target sequence
aacttaggaccagatcagaca

SEQ ID NO: 307283 - DNA, 21 bp, Artificial sequence
  SiRNA target sequence
acttaggaccagatcagacac

SEQ ID NO: 307284 - DNA, 21 bp, Artificial sequence
  SiRNA target sequence
cttaggaccagatcagacaca

SEQ ID NO: 307285 - DNA, 21 bp, Artificial sequence
  SiRNA target sequence
ttaggaccagatcagacacaa

SEQ ID NO: 307286 - DNA, 21 bp, Artificial sequence
  SiRNA target sequence
taggaccagatcagacacaat

SEQ ID NO: 307287 - DNA, 21 bp, Artificial sequence
  SiRNA target sequence
aggaccagatcagacacaatt

SEQ ID NO: 307288 - DNA, 21 bp, Artificial sequence
  SiRNA target sequence
ggaccagatcagacacaattg

SEQ ID NO: 307289 - DNA, 21 bp, Artificial sequence
  SiRNA target sequence
gaccagatcagacacaattga

SEQ ID NO: 307290 - DNA, 21 bp, Artificial sequence
  SiRNA target sequence
accagatcagacacaattgaa

SEQ ID NO: 307291 - DNA, 21 bp, Artificial sequence
  SiRNA target sequence
ccagatcagacacaattgaac

SEQ ID NO: 307292 - DNA, 21 bp, Artificial sequence
  SiRNA target sequence
cagatcagacacaattgaacg

SEQ ID NO: 307293 - DNA, 21 bp, Artificial sequence
  SiRNA target sequence
agatcagacacaattgaacgg

SEQ ID NO: 307294 - DNA, 21 bp, Artificial sequence
  SiRNA target sequence
gatcagacacaattgaacgga

SEQ ID NO: 307295 - DNA, 21 bp, Artificial sequence
  SiRNA target sequence
atcagacacaattgaacggaa

SEQ ID NO: 307296 - DNA, 21 bp, Artificial sequence
  SiRNA target sequence
tcagacacaattgaacggaac

SEQ ID NO: 307297 - DNA, 21 bp, Artificial sequence
  SiRNA target sequence
cagacacaattgaacggaaca

SEQ ID NO: 307298 - DNA, 21 bp, Artificial sequence
  SiRNA target sequence
agacacaattgaacggaacaa

SEQ ID NO: 307299 - DNA, 21 bp, Artificial sequence
  SiRNA target sequence
gacacaattgaacggaacaat

SEQ ID NO: 307300 - DNA, 21 bp, Artificial sequence
  SiRNA target sequence
acacaattgaacggaacaata

SEQ ID NO: 307301 - DNA, 21 bp, Artificial sequence
  SiRNA target sequence
cacaattgaacggaacaatag

SEQ ID NO: 307302 - DNA, 21 bp, Artificial sequence
  SiRNA target sequence
acaattgaacggaacaatagc

SEQ ID NO: 307303 - DNA, 21 bp, Artificial sequence
  SiRNA target sequence
caattgaacggaacaatagct

SEQ ID NO: 307304 - DNA, 21 bp, Artificial sequence
  SiRNA target sequence
aattgaacggaacaatagctc

SEQ ID NO: 307305 - DNA, 21 bp, Artificial sequence
  SiRNA target sequence
attgaacggaacaatagctcc

SEQ ID NO: 307306 - DNA, 21 bp, Artificial sequence
  SiRNA target sequence
ttgaacggaacaatagctcca

SEQ ID NO: 307307 - DNA, 21 bp, Artificial sequence
  SiRNA target sequence
tgaacggaacaatagctccat

SEQ ID NO: 307308 - DNA, 21 bp, Artificial sequence
  SiRNA target sequence
gaacggaacaatagctccatc

SEQ ID NO: 307309 - DNA, 21 bp, Artificial sequence
  SiRNA target sequence
aacggaacaatagctccatcc

SEQ ID NO: 307310 - DNA, 21 bp, Artificial sequence
  SiRNA target sequence
acggaacaatagctccatccg

SEQ ID NO: 307311 - DNA, 21 bp, Artificial sequence
  SiRNA target sequence
cggaacaatagctccatccga

SEQ ID NO: 307312 - DNA, 21 bp, Artificial sequence
  SiRNA target sequence
ggaacaatagctccatccgat

SEQ ID NO: 307313 - DNA, 21 bp, Artificial sequence
  SiRNA target sequence
gaacaatagctccatccgata

SEQ ID NO: 307314 - DNA, 21 bp, Artificial sequence
  SiRNA target sequence
aacaatagctccatccgataa

SEQ ID NO: 307315 - DNA, 21 bp, Artificial sequence
  SiRNA target sequence
acaatagctccatccgataac

SEQ ID NO: 307316 - DNA, 21 bp, Artificial sequence
  SiRNA target sequence
caatagctccatccgataaca

SEQ ID NO: 307317 - DNA, 21 bp, Artificial sequence
  SiRNA target sequence
aatagctccatccgataacaa

SEQ ID NO: 307318 - DNA, 21 bp, Artificial sequence
  SiRNA target sequence
atagctccatccgataacaac

SEQ ID NO: 307319 - DNA, 21 bp, Artificial sequence
  SiRNA target sequence
tagctccatccgataacaact

SEQ ID NO: 307320 - DNA, 21 bp, Artificial sequence
  SiRNA target sequence
agctccatccgataacaacta

SEQ ID NO: 307321 - DNA, 21 bp, Artificial sequence
  SiRNA target sequence
gctccatccgataacaactat

SEQ ID NO: 307322 - DNA, 21 bp, Artificial sequence
  SiRNA target sequence
ctccatccgataacaactata

SEQ ID NO: 307323 - DNA, 21 bp, Artificial sequence
  SiRNA target sequence
tccatccgataacaactataa

SEQ ID NO: 307324 - DNA, 21 bp, Artificial sequence
  SiRNA target sequence
ccatccgataacaactataag

SEQ ID NO: 307325 - DNA, 21 bp, Artificial sequence
  SiRNA target sequence
catccgataacaactataagt

SEQ ID NO: 307326 - DNA, 21 bp, Artificial sequence
  SiRNA target sequence
atccgataacaactataagta

SEQ ID NO: 307327 - DNA, 21 bp, Artificial sequence
  SiRNA target sequence
tccgataacaactataagtat

SEQ ID NO: 307328 - DNA, 21 bp, Artificial sequence
  SiRNA target sequence
ccgataacaactataagtata

SEQ ID NO: 307329 - DNA, 21 bp, Artificial sequence
  SiRNA target sequence
cgataacaactataagtatat

SEQ ID NO: 307330 - DNA, 21 bp, Artificial sequence
  SiRNA target sequence
gataacaactataagtatata

SEQ ID NO: 307331 - DNA, 21 bp, Artificial sequence
  SiRNA target sequence
ataacaactataagtatatat

SEQ ID NO: 307332 - DNA, 21 bp, Artificial sequence
  SiRNA target sequence
taacaactataagtatatatt

SEQ ID NO: 307333 - DNA, 21 bp, Artificial sequence
  SiRNA target sequence
aacaactataagtatatatta

SEQ ID NO: 307334 - DNA, 21 bp, Artificial sequence
  SiRNA target sequence
acaactataagtatatattag

SEQ ID NO: 307335 - DNA, 21 bp, Artificial sequence
  SiRNA target sequence
caactataagtatatattaga

SEQ ID NO: 307336 - DNA, 21 bp, Artificial sequence
  SiRNA target sequence
aactataagtatatattagac

SEQ ID NO: 307337 - DNA, 21 bp, Artificial sequence
  SiRNA target sequence
actataagtatatattagact

SEQ ID NO: 307338 - DNA, 21 bp, Artificial sequence
  SiRNA target sequence
ctataagtatatattagactt

SEQ ID NO: 307339 - DNA, 21 bp, Artificial sequence
  SiRNA target sequence
tataagtatatattagactta

SEQ ID NO: 307340 - DNA, 21 bp, Artificial sequence
  SiRNA target sequence
ataagtatatattagacttaa

SEQ ID NO: 307341 - DNA, 21 bp, Artificial sequence
  SiRNA target sequence
taagtatatattagacttaac

SEQ ID NO: 307342 - DNA, 21 bp, Artificial sequence
  SiRNA target sequence
aagtatatattagacttaaca

SEQ ID NO: 307343 - DNA, 21 bp, Artificial sequence
  SiRNA target sequence
agtatatattagacttaacaa

SEQ ID NO: 307344 - DNA, 21 bp, Artificial sequence
  SiRNA target sequence
gtatatattagacttaacaaa

SEQ ID NO: 307345 - DNA, 21 bp, Artificial sequence
  SiRNA target sequence
tatatattagacttaacaaat

SEQ ID NO: 307346 - DNA, 21 bp, Artificial sequence
  SiRNA target sequence
atatattagacttaacaaatg

SEQ ID NO: 307347 - DNA, 21 bp, Artificial sequence
  SiRNA target sequence
tatattagacttaacaaatga

SEQ ID NO: 307348 - DNA, 21 bp, Artificial sequence
  SiRNA target sequence
atattagacttaacaaatgat

SEQ ID NO: 307349 - DNA, 21 bp, Artificial sequence
  SiRNA target sequence
tattagacttaacaaatgata

SEQ ID NO: 307350 - DNA, 21 bp, Artificial sequence
  SiRNA target sequence
attagacttaacaaatgatac

SEQ ID NO: 307351 - DNA, 21 bp, Artificial sequence
  SiRNA target sequence
ttagacttaacaaatgatact

SEQ ID NO: 307352 - DNA, 21 bp, Artificial sequence
  SiRNA target sequence
tagacttaacaaatgatactg

SEQ ID NO: 307353 - DNA, 21 bp, Artificial sequence
  SiRNA target sequence
agacttaacaaatgatactga

SEQ ID NO: 307354 - DNA, 21 bp, Artificial sequence
  SiRNA target sequence
gacttaacaaatgatactgag

SEQ ID NO: 307355 - DNA, 21 bp, Artificial sequence
  SiRNA target sequence
acttaacaaatgatactgagg

SEQ ID NO: 307356 - DNA, 21 bp, Artificial sequence
  SiRNA target sequence
cttaacaaatgatactgaggt

SEQ ID NO: 307357 - DNA, 21 bp, Artificial sequence
  SiRNA target sequence
ttaacaaatgatactgaggtt

SEQ ID NO: 307358 - DNA, 21 bp, Artificial sequence
  SiRNA target sequence
taacaaatgatactgaggtta

SEQ ID NO: 307359 - DNA, 21 bp, Artificial sequence
  SiRNA target sequence
aacaaatgatactgaggttac

SEQ ID NO: 307360 - DNA, 21 bp, Artificial sequence
  SiRNA target sequence
acaaatgatactgaggttacg

SEQ ID NO: 307361 - DNA, 21 bp, Artificial sequence
  SiRNA target sequence
caaatgatactgaggttacga

SEQ ID NO: 307362 - DNA, 21 bp, Artificial sequence
  SiRNA target sequence
aaatgatactgaggttacgat

SEQ ID NO: 307363 - DNA, 21 bp, Artificial sequence
  SiRNA target sequence
aatgatactgaggttacgatc

SEQ ID NO: 307364 - DNA, 21 bp, Artificial sequence
  SiRNA target sequence
atgatactgaggttacgatca

SEQ ID NO: 307365 - DNA, 21 bp, Artificial sequence
  SiRNA target sequence
tgatactgaggttacgatcaa

SEQ ID NO: 307366 - DNA, 21 bp, Artificial sequence
  SiRNA target sequence
gatactgaggttacgatcaaa

SEQ ID NO: 307367 - DNA, 21 bp, Artificial sequence
  SiRNA target sequence
atactgaggttacgatcaaag

SEQ ID NO: 307368 - DNA, 21 bp, Artificial sequence
  SiRNA target sequence
tactgaggttacgatcaaagt

SEQ ID NO: 307369 - DNA, 21 bp, Artificial sequence
  SiRNA target sequence
actgaggttacgatcaaagta

SEQ ID NO: 307370 - DNA, 21 bp, Artificial sequence
  SiRNA target sequence
ctgaggttacgatcaaagtac

SEQ ID NO: 307371 - DNA, 21 bp, Artificial sequence
  SiRNA target sequence
tgaggttacgatcaaagtacc

SEQ ID NO: 307372 - DNA, 21 bp, Artificial sequence
  SiRNA target sequence
gaggttacgatcaaagtacca

SEQ ID NO: 307373 - DNA, 21 bp, Artificial sequence
  SiRNA target sequence
aggttacgatcaaagtaccat

SEQ ID NO: 307374 - DNA, 21 bp, Artificial sequence
  SiRNA target sequence
ggttacgatcaaagtaccata

SEQ ID NO: 307375 - DNA, 21 bp, Artificial sequence
  SiRNA target sequence
gttacgatcaaagtaccatat

SEQ ID NO: 307376 - DNA, 21 bp, Artificial sequence
  SiRNA target sequence
ttacgatcaaagtaccatatg

SEQ ID NO: 307377 - DNA, 21 bp, Artificial sequence
  SiRNA target sequence
tacgatcaaagtaccatatgt

SEQ ID NO: 307378 - DNA, 21 bp, Artificial sequence
  SiRNA target sequence
acgatcaaagtaccatatgtt

SEQ ID NO: 307379 - DNA, 21 bp, Artificial sequence
  SiRNA target sequence
cgatcaaagtaccatatgttt

SEQ ID NO: 307380 - DNA, 21 bp, Artificial sequence
  SiRNA target sequence
gatcaaagtaccatatgtttc

SEQ ID NO: 307381 - DNA, 21 bp, Artificial sequence
  SiRNA target sequence
atcaaagtaccatatgtttcg

SEQ ID NO: 307382 - DNA, 21 bp, Artificial sequence
  SiRNA target sequence
tcaaagtaccatatgtttcga

SEQ ID NO: 307383 - DNA, 21 bp, Artificial sequence
  SiRNA target sequence
caaagtaccatatgtttcgaa

SEQ ID NO: 307384 - DNA, 21 bp, Artificial sequence
  SiRNA target sequence
aaagtaccatatgtttcgaat

SEQ ID NO: 307385 - DNA, 21 bp, Artificial sequence
  SiRNA target sequence
aagtaccatatgtttcgaata

SEQ ID NO: 307386 - DNA, 21 bp, Artificial sequence
  SiRNA target sequence
agtaccatatgtttcgaataa

SEQ ID NO: 307387 - DNA, 21 bp, Artificial sequence
  SiRNA target sequence
gtaccatatgtttcgaataag

SEQ ID NO: 307388 - DNA, 21 bp, Artificial sequence
  SiRNA target sequence
taccatatgtttcgaataaga

SEQ ID NO: 307389 - DNA, 21 bp, Artificial sequence
  SiRNA target sequence
accatatgtttcgaataagat

SEQ ID NO: 307390 - DNA, 21 bp, Artificial sequence
  SiRNA target sequence
ccatatgtttcgaataagatg

SEQ ID NO: 307391 - DNA, 21 bp, Artificial sequence
  SiRNA target sequence
catatgtttcgaataagatgt

SEQ ID NO: 307392 - DNA, 21 bp, Artificial sequence
  SiRNA target sequence
atatgtttcgaataagatgtt

SEQ ID NO: 307393 - DNA, 21 bp, Artificial sequence
  SiRNA target sequence
tatgtttcgaataagatgttt

SEQ ID NO: 307394 - DNA, 21 bp, Artificial sequence
  SiRNA target sequence
atgtttcgaataagatgttta

SEQ ID NO: 307395 - DNA, 21 bp, Artificial sequence
  SiRNA target sequence
tgtttcgaataagatgtttat

SEQ ID NO: 307396 - DNA, 21 bp, Artificial sequence
  SiRNA target sequence
gtttcgaataagatgtttatg

SEQ ID NO: 307397 - DNA, 21 bp, Artificial sequence
  SiRNA target sequence
tttcgaataagatgtttatga

SEQ ID NO: 307398 - DNA, 21 bp, Artificial sequence
  SiRNA target sequence
ttcgaataagatgtttatgaa

SEQ ID NO: 307399 - DNA, 21 bp, Artificial sequence
  SiRNA target sequence
tcgaataagatgtttatgaag

SEQ ID NO: 307400 - DNA, 21 bp, Artificial sequence
  SiRNA target sequence
cgaataagatgtttatgaaga

SEQ ID NO: 307401 - DNA, 21 bp, Artificial sequence
  SiRNA target sequence
gaataagatgtttatgaagac

SEQ ID NO: 307402 - DNA, 21 bp, Artificial sequence
  SiRNA target sequence
aataagatgtttatgaagacc

SEQ ID NO: 307403 - DNA, 21 bp, Artificial sequence
  SiRNA target sequence
ataagatgtttatgaagaccg

SEQ ID NO: 307404 - DNA, 21 bp, Artificial sequence
  SiRNA target sequence
taagatgtttatgaagaccgt

SEQ ID NO: 307405 - DNA, 21 bp, Artificial sequence
  SiRNA target sequence
aagatgtttatgaagaccgtt

SEQ ID NO: 307406 - DNA, 21 bp, Artificial sequence
  SiRNA target sequence
agatgtttatgaagaccgttg

SEQ ID NO: 307407 - DNA, 21 bp, Artificial sequence
  SiRNA target sequence
gatgtttatgaagaccgttgg

SEQ ID NO: 307408 - DNA, 21 bp, Artificial sequence
  SiRNA target sequence
atgtttatgaagaccgttggc

SEQ ID NO: 307409 - DNA, 21 bp, Artificial sequence
  SiRNA target sequence
tgtttatgaagaccgttggca

SEQ ID NO: 307410 - DNA, 21 bp, Artificial sequence
  SiRNA target sequence
gtttatgaagaccgttggcat

SEQ ID NO: 307411 - DNA, 21 bp, Artificial sequence
  SiRNA target sequence
tttatgaagaccgttggcatc

SEQ ID NO: 307412 - DNA, 21 bp, Artificial sequence
  SiRNA target sequence
ttatgaagaccgttggcatct

SEQ ID NO: 307413 - DNA, 21 bp, Artificial sequence
  SiRNA target sequence
tatgaagaccgttggcatcta

SEQ ID NO: 307414 - DNA, 21 bp, Artificial sequence
  SiRNA target sequence
atgaagaccgttggcatctac

SEQ ID NO: 307415 - DNA, 21 bp, Artificial sequence
  SiRNA target sequence
tgaagaccgttggcatctacg

SEQ ID NO: 307416 - DNA, 21 bp, Artificial sequence
  SiRNA target sequence
gaagaccgttggcatctacgg

SEQ ID NO: 307417 - DNA, 21 bp, Artificial sequence
  SiRNA target sequence
aagaccgttggcatctacggt

SEQ ID NO: 307418 - DNA, 21 bp, Artificial sequence
  SiRNA target sequence
agaccgttggcatctacggtg

SEQ ID NO: 307419 - DNA, 21 bp, Artificial sequence
  SiRNA target sequence
gaccgttggcatctacggtgc

SEQ ID NO: 307420 - DNA, 21 bp, Artificial sequence
  SiRNA target sequence
accgttggcatctacggtgcg

SEQ ID NO: 307421 - DNA, 21 bp, Artificial sequence
  SiRNA target sequence
ccgttggcatctacggtgcgc

SEQ ID NO: 307422 - DNA, 21 bp, Artificial sequence
  SiRNA target sequence
cgttggcatctacggtgcgca

SEQ ID NO: 307423 - DNA, 21 bp, Artificial sequence
  SiRNA target sequence
gttggcatctacggtgcgcat

SEQ ID NO: 307424 - DNA, 21 bp, Artificial sequence
  SiRNA target sequence
ttggcatctacggtgcgcatg

SEQ ID NO: 307425 - DNA, 21 bp, Artificial sequence
  SiRNA target sequence
tggcatctacggtgcgcatga

SEQ ID NO: 307426 - DNA, 21 bp, Artificial sequence
  SiRNA target sequence
ggcatctacggtgcgcatgat

SEQ ID NO: 307427 - DNA, 21 bp, Artificial sequence
  SiRNA target sequence
gcatctacggtgcgcatgatg

SEQ ID NO: 307428 - DNA, 21 bp, Artificial sequence
  SiRNA target sequence
catctacggtgcgcatgatga

SEQ ID NO: 307429 - DNA, 21 bp, Artificial sequence
  SiRNA target sequence
atctacggtgcgcatgatgag

SEQ ID NO: 307430 - DNA, 21 bp, Artificial sequence
  SiRNA target sequence
tctacggtgcgcatgatgagg

SEQ ID NO: 307431 - DNA, 21 bp, Artificial sequence
  SiRNA target sequence
ctacggtgcgcatgatgagga

SEQ ID NO: 307432 - DNA, 21 bp, Artificial sequence
  SiRNA target sequence
tacggtgcgcatgatgaggat

SEQ ID NO: 307433 - DNA, 21 bp, Artificial sequence
  SiRNA target sequence
acggtgcgcatgatgaggata

SEQ ID NO: 307434 - DNA, 21 bp, Artificial sequence
  SiRNA target sequence
cggtgcgcatgatgaggataa

SEQ ID NO: 307435 - DNA, 21 bp, Artificial sequence
  SiRNA target sequence
ggtgcgcatgatgaggataat

SEQ ID NO: 307436 - DNA, 21 bp, Artificial sequence
  SiRNA target sequence
gtgcgcatgatgaggataatt

SEQ ID NO: 307437 - DNA, 21 bp, Artificial sequence
  SiRNA target sequence
tgcgcatgatgaggataattg

SEQ ID NO: 307438 - DNA, 21 bp, Artificial sequence
  SiRNA target sequence
gcgcatgatgaggataattgg

SEQ ID NO: 307439 - DNA, 21 bp, Artificial sequence
  SiRNA target sequence
cgcatgatgaggataattgga

SEQ ID NO: 307440 - DNA, 21 bp, Artificial sequence
  SiRNA target sequence
gcatgatgaggataattggaa

SEQ ID NO: 307441 - DNA, 21 bp, Artificial sequence
  SiRNA target sequence
catgatgaggataattggaac

SEQ ID NO: 307442 - DNA, 21 bp, Artificial sequence
  SiRNA target sequence
atgatgaggataattggaact

SEQ ID NO: 307443 - DNA, 21 bp, Artificial sequence
  SiRNA target sequence
tgatgaggataattggaactt

SEQ ID NO: 307444 - DNA, 21 bp, Artificial sequence
  SiRNA target sequence
gatgaggataattggaacttt

SEQ ID NO: 307445 - DNA, 21 bp, Artificial sequence
  SiRNA target sequence
atgaggataattggaactttg

SEQ ID NO: 307446 - DNA, 21 bp, Artificial sequence
  SiRNA target sequence
tgaggataattggaactttga

SEQ ID NO: 307447 - DNA, 21 bp, Artificial sequence
  SiRNA target sequence
gaggataattggaactttgat

SEQ ID NO: 307448 - DNA, 21 bp, Artificial sequence
  SiRNA target sequence
aggataattggaactttgatg

SEQ ID NO: 307449 - DNA, 21 bp, Artificial sequence
  SiRNA target sequence
ggataattggaactttgatga

SEQ ID NO: 307450 - DNA, 21 bp, Artificial sequence
  SiRNA target sequence
gataattggaactttgatgaa

SEQ ID NO: 307451 - DNA, 21 bp, Artificial sequence
  SiRNA target sequence
ataattggaactttgatgaat

SEQ ID NO: 307452 - DNA, 21 bp, Artificial sequence
  SiRNA target sequence
taattggaactttgatgaatc

SEQ ID NO: 307453 - DNA, 21 bp, Artificial sequence
  SiRNA target sequence
aattggaactttgatgaatcc

SEQ ID NO: 307454 - DNA, 21 bp, Artificial sequence
  SiRNA target sequence
attggaactttgatgaatcct

SEQ ID NO: 307455 - DNA, 21 bp, Artificial sequence
  SiRNA target sequence
ttggaactttgatgaatcctt

SEQ ID NO: 307456 - DNA, 21 bp, Artificial sequence
  SiRNA target sequence
tggaactttgatgaatccttc

SEQ ID NO: 307457 - DNA, 21 bp, Artificial sequence
  SiRNA target sequence
ggaactttgatgaatccttca

SEQ ID NO: 307458 - DNA, 21 bp, Artificial sequence
  SiRNA target sequence
gaactttgatgaatccttcac

SEQ ID NO: 307459 - DNA, 21 bp, Artificial sequence
  SiRNA target sequence
aactttgatgaatccttcacc

SEQ ID NO: 307460 - DNA, 21 bp, Artificial sequence
  SiRNA target sequence
actttgatgaatccttcaccg

SEQ ID NO: 307461 - DNA, 21 bp, Artificial sequence
  SiRNA target sequence
ctttgatgaatccttcaccgg

SEQ ID NO: 307462 - DNA, 21 bp, Artificial sequence
  SiRNA target sequence
tttgatgaatccttcaccgga

SEQ ID NO: 307463 - DNA, 21 bp, Artificial sequence
  SiRNA target sequence
ttgatgaatccttcaccggat

SEQ ID NO: 307464 - DNA, 21 bp, Artificial sequence
  SiRNA target sequence
tgatgaatccttcaccggatt

SEQ ID NO: 307465 - DNA, 21 bp, Artificial sequence
  SiRNA target sequence
gatgaatccttcaccggattc

SEQ ID NO: 307466 - DNA, 21 bp, Artificial sequence
  SiRNA target sequence
atgaatccttcaccggattct

SEQ ID NO: 307467 - DNA, 21 bp, Artificial sequence
  SiRNA target sequence
tgaatccttcaccggattctt

SEQ ID NO: 307468 - DNA, 21 bp, Artificial sequence
  SiRNA target sequence
gaatccttcaccggattcttg

SEQ ID NO: 307469 - DNA, 21 bp, Artificial sequence
  SiRNA target sequence
aatccttcaccggattcttgt

SEQ ID NO: 307470 - DNA, 21 bp, Artificial sequence
  SiRNA target sequence
atccttcaccggattcttgtg

SEQ ID NO: 307471 - DNA, 21 bp, Artificial sequence
  SiRNA target sequence
tccttcaccggattcttgtgc

SEQ ID NO: 307472 - DNA, 21 bp, Artificial sequence
  SiRNA target sequence
ccttcaccggattcttgtgca

SEQ ID NO: 307473 - DNA, 21 bp, Artificial sequence
  SiRNA target sequence
cttcaccggattcttgtgcat

SEQ ID NO: 307474 - DNA, 21 bp, Artificial sequence
  SiRNA target sequence
ttcaccggattcttgtgcata

SEQ ID NO: 307475 - DNA, 21 bp, Artificial sequence
  SiRNA target sequence
tcaccggattcttgtgcataa

SEQ ID NO: 307476 - DNA, 21 bp, Artificial sequence
  SiRNA target sequence
caccggattcttgtgcataag

SEQ ID NO: 307477 - DNA, 21 bp, Artificial sequence
  SiRNA target sequence
accggattcttgtgcataagg

SEQ ID NO: 307478 - DNA, 21 bp, Artificial sequence
  SiRNA target sequence
ccggattcttgtgcataaggc

SEQ ID NO: 307479 - DNA, 21 bp, Artificial sequence
  SiRNA target sequence
cggattcttgtgcataaggcc

SEQ ID NO: 307480 - DNA, 21 bp, Artificial sequence
  SiRNA target sequence
ggattcttgtgcataaggcca

SEQ ID NO: 307481 - DNA, 21 bp, Artificial sequence
  SiRNA target sequence
gattcttgtgcataaggccaa

SEQ ID NO: 307482 - DNA, 21 bp, Artificial sequence
  SiRNA target sequence
attcttgtgcataaggccaat

SEQ ID NO: 307483 - DNA, 21 bp, Artificial sequence
  SiRNA target sequence
ttcttgtgcataaggccaatt

SEQ ID NO: 307484 - DNA, 21 bp, Artificial sequence
  SiRNA target sequence
tcttgtgcataaggccaatta

SEQ ID NO: 307485 - DNA, 21 bp, Artificial sequence
  SiRNA target sequence
cttgtgcataaggccaattac

SEQ ID NO: 307486 - DNA, 21 bp, Artificial sequence
  SiRNA target sequence
ttgtgcataaggccaattact

SEQ ID NO: 307487 - DNA, 21 bp, Artificial sequence
  SiRNA target sequence
tgtgcataaggccaattacta

SEQ ID NO: 307488 - DNA, 21 bp, Artificial sequence
  SiRNA target sequence
gtgcataaggccaattactaa

SEQ ID NO: 307489 - DNA, 21 bp, Artificial sequence
  SiRNA target sequence
tgcataaggccaattactaaa

SEQ ID NO: 307490 - DNA, 21 bp, Artificial sequence
  SiRNA target sequence
gcataaggccaattactaaac

SEQ ID NO: 307491 - DNA, 21 bp, Artificial sequence
  SiRNA target sequence
cataaggccaattactaaact

SEQ ID NO: 307492 - DNA, 21 bp, Artificial sequence
  SiRNA target sequence
ataaggccaattactaaactc

SEQ ID NO: 307493 - DNA, 21 bp, Artificial sequence
  SiRNA target sequence
taaggccaattactaaactca

SEQ ID NO: 307494 - DNA, 21 bp, Artificial sequence
  SiRNA target sequence
aaggccaattactaaactcat

SEQ ID NO: 307495 - DNA, 21 bp, Artificial sequence
  SiRNA target sequence
aggccaattactaaactcatg

SEQ ID NO: 307496 - DNA, 21 bp, Artificial sequence
  SiRNA target sequence
ggccaattactaaactcatgg

SEQ ID NO: 307497 - DNA, 21 bp, Artificial sequence
  SiRNA target sequence
gccaattactaaactcatggc

SEQ ID NO: 307498 - DNA, 21 bp, Artificial sequence
  SiRNA target sequence
ccaattactaaactcatggca

SEQ ID NO: 307499 - DNA, 21 bp, Artificial sequence
  SiRNA target sequence
caattactaaactcatggcac

SEQ ID NO: 307500 - DNA, 21 bp, Artificial sequence
  SiRNA target sequence
aattactaaactcatggcacc

SEQ ID NO: 307501 - DNA, 21 bp, Artificial sequence
  SiRNA target sequence
attactaaactcatggcacct

SEQ ID NO: 307502 - DNA, 21 bp, Artificial sequence
  SiRNA target sequence
ttactaaactcatggcacctg

SEQ ID NO: 307503 - DNA, 21 bp, Artificial sequence
  SiRNA target sequence
tactaaactcatggcacctga

SEQ ID NO: 307504 - DNA, 21 bp, Artificial sequence
  SiRNA target sequence
actaaactcatggcacctgat

SEQ ID NO: 307505 - DNA, 21 bp, Artificial sequence
  SiRNA target sequence
ctaaactcatggcacctgata

SEQ ID NO: 307506 - DNA, 21 bp, Artificial sequence
  SiRNA target sequence
taaactcatggcacctgatac

SEQ ID NO: 307507 - DNA, 21 bp, Artificial sequence
  SiRNA target sequence
aaactcatggcacctgatacg

SEQ ID NO: 307508 - DNA, 21 bp, Artificial sequence
  SiRNA target sequence
aactcatggcacctgatacgg

SEQ ID NO: 307509 - DNA, 21 bp, Artificial sequence
  SiRNA target sequence
actcatggcacctgatacggt

SEQ ID NO: 307510 - DNA, 21 bp, Artificial sequence
  SiRNA target sequence
ctcatggcacctgatacggta

SEQ ID NO: 307511 - DNA, 21 bp, Artificial sequence
  SiRNA target sequence
tcatggcacctgatacggtat

SEQ ID NO: 307512 - DNA, 21 bp, Artificial sequence
  SiRNA target sequence
catggcacctgatacggtatc

SEQ ID NO: 307513 - DNA, 21 bp, Artificial sequence
  SiRNA target sequence
atggcacctgatacggtatcg

SEQ ID NO: 307514 - DNA, 21 bp, Artificial sequence
  SiRNA target sequence
tggcacctgatacggtatcgc

SEQ ID NO: 307515 - DNA, 21 bp, Artificial sequence
  SiRNA target sequence
ggcacctgatacggtatcgca

SEQ ID NO: 307516 - DNA, 21 bp, Artificial sequence
  SiRNA target sequence
gcacctgatacggtatcgcag

SEQ ID NO: 307517 - DNA, 21 bp, Artificial sequence
  SiRNA target sequence
cacctgatacggtatcgcaga

SEQ ID NO: 307518 - DNA, 21 bp, Artificial sequence
  SiRNA target sequence
acctgatacggtatcgcagaa

SEQ ID NO: 307519 - DNA, 21 bp, Artificial sequence
  SiRNA target sequence
cctgatacggtatcgcagaaa

SEQ ID NO: 307520 - DNA, 21 bp, Artificial sequence
  SiRNA target sequence
ctgatacggtatcgcagaaag

SEQ ID NO: 307521 - DNA, 21 bp, Artificial sequence
  SiRNA target sequence
tgatacggtatcgcagaaagt

SEQ ID NO: 307522 - DNA, 21 bp, Artificial sequence
  SiRNA target sequence
gatacggtatcgcagaaagta

SEQ ID NO: 307523 - DNA, 21 bp, Artificial sequence
  SiRNA target sequence
atacggtatcgcagaaagtat

SEQ ID NO: 307524 - DNA, 21 bp, Artificial sequence
  SiRNA target sequence
tacggtatcgcagaaagtatc

SEQ ID NO: 307525 - DNA, 21 bp, Artificial sequence
  SiRNA target sequence
acggtatcgcagaaagtatct

SEQ ID NO: 307526 - DNA, 21 bp, Artificial sequence
  SiRNA target sequence
cggtatcgcagaaagtatcta

SEQ ID NO: 307527 - DNA, 21 bp, Artificial sequence
  SiRNA target sequence
ggtatcgcagaaagtatctat

SEQ ID NO: 307528 - DNA, 21 bp, Artificial sequence
  SiRNA target sequence
gtatcgcagaaagtatctata

SEQ ID NO: 307529 - DNA, 21 bp, Artificial sequence
  SiRNA target sequence
tatcgcagaaagtatctatag

SEQ ID NO: 307530 - DNA, 21 bp, Artificial sequence
  SiRNA target sequence
atcgcagaaagtatctatagt

SEQ ID NO: 307531 - DNA, 21 bp, Artificial sequence
  SiRNA target sequence
tcgcagaaagtatctatagtt

SEQ ID NO: 307532 - DNA, 21 bp, Artificial sequence
  SiRNA target sequence
cgcagaaagtatctatagttg

SEQ ID NO: 307533 - DNA, 21 bp, Artificial sequence
  SiRNA target sequence
gcagaaagtatctatagttgt

SEQ ID NO: 307534 - DNA, 21 bp, Artificial sequence
  SiRNA target sequence
cagaaagtatctatagttgta

SEQ ID NO: 307535 - DNA, 21 bp, Artificial sequence
  SiRNA target sequence
agaaagtatctatagttgtat

SEQ ID NO: 307536 - DNA, 21 bp, Artificial sequence
  SiRNA target sequence
gaaagtatctatagttgtatg

SEQ ID NO: 307537 - DNA, 21 bp, Artificial sequence
  SiRNA target sequence
aaagtatctatagttgtatgg

SEQ ID NO: 307538 - DNA, 21 bp, Artificial sequence
  SiRNA target sequence
aagtatctatagttgtatgga

SEQ ID NO: 307539 - DNA, 21 bp, Artificial sequence
  SiRNA target sequence
agtatctatagttgtatggaa

SEQ ID NO: 307540 - DNA, 21 bp, Artificial sequence
  SiRNA target sequence
gtatctatagttgtatggaaa

SEQ ID NO: 307541 - DNA, 21 bp, Artificial sequence
  SiRNA target sequence
tatctatagttgtatggaaat

SEQ ID NO: 307542 - DNA, 21 bp, Artificial sequence
  SiRNA target sequence
atctatagttgtatggaaatg

SEQ ID NO: 307543 - DNA, 21 bp, Artificial sequence
  SiRNA target sequence
tctatagttgtatggaaatgg

SEQ ID NO: 307544 - DNA, 21 bp, Artificial sequence
  SiRNA target sequence
ctatagttgtatggaaatggg

SEQ ID NO: 307545 - DNA, 21 bp, Artificial sequence
  SiRNA target sequence
tatagttgtatggaaatgggc

SEQ ID NO: 307546 - DNA, 21 bp, Artificial sequence
  SiRNA target sequence
atagttgtatggaaatgggca

SEQ ID NO: 307547 - DNA, 21 bp, Artificial sequence
  SiRNA target sequence
tagttgtatggaaatgggcag

SEQ ID NO: 307548 - DNA, 21 bp, Artificial sequence
  SiRNA target sequence
agttgtatggaaatgggcaga

SEQ ID NO: 307549 - DNA, 21 bp, Artificial sequence
  SiRNA target sequence
gttgtatggaaatgggcagaa

SEQ ID NO: 307550 - DNA, 21 bp, Artificial sequence
  SiRNA target sequence
ttgtatggaaatgggcagaag

SEQ ID NO: 307551 - DNA, 21 bp, Artificial sequence
  SiRNA target sequence
tgtatggaaatgggcagaaga

SEQ ID NO: 307552 - DNA, 21 bp, Artificial sequence
  SiRNA target sequence
gtatggaaatgggcagaagac

SEQ ID NO: 307553 - DNA, 21 bp, Artificial sequence
  SiRNA target sequence
tatggaaatgggcagaagacg

SEQ ID NO: 307554 - DNA, 21 bp, Artificial sequence
  SiRNA target sequence
atggaaatgggcagaagacgt

SEQ ID NO: 307555 - DNA, 21 bp, Artificial sequence
  SiRNA target sequence
tggaaatgggcagaagacgta

SEQ ID NO: 307556 - DNA, 21 bp, Artificial sequence
  SiRNA target sequence
ggaaatgggcagaagacgtag

SEQ ID NO: 307557 - DNA, 21 bp, Artificial sequence
  SiRNA target sequence
gaaatgggcagaagacgtagt

SEQ ID NO: 307558 - DNA, 21 bp, Artificial sequence
  SiRNA target sequence
aaatgggcagaagacgtagta

SEQ ID NO: 307559 - DNA, 21 bp, Artificial sequence
  SiRNA target sequence
aatgggcagaagacgtagtag

SEQ ID NO: 307560 - DNA, 21 bp, Artificial sequence
  SiRNA target sequence
atgggcagaagacgtagtagt

SEQ ID NO: 307561 - DNA, 21 bp, Artificial sequence
  SiRNA target sequence
tgggcagaagacgtagtagta

SEQ ID NO: 307562 - DNA, 21 bp, Artificial sequence
  SiRNA target sequence
gggcagaagacgtagtagtag

SEQ ID NO: 307563 - DNA, 21 bp, Artificial sequence
  SiRNA target sequence
ggcagaagacgtagtagtagt

SEQ ID NO: 307564 - DNA, 21 bp, Artificial sequence
  SiRNA target sequence
gcagaagacgtagtagtagta

SEQ ID NO: 307565 - DNA, 21 bp, Artificial sequence
  SiRNA target sequence
cagaagacgtagtagtagtag

SEQ ID NO: 307566 - DNA, 21 bp, Artificial sequence
  SiRNA target sequence
agaagacgtagtagtagtaga

SEQ ID NO: 307567 - DNA, 21 bp, Artificial sequence
  SiRNA target sequence
gaagacgtagtagtagtagaa

SEQ ID NO: 307568 - DNA, 21 bp, Artificial sequence
  SiRNA target sequence
aagacgtagtagtagtagaac

SEQ ID NO: 307569 - DNA, 21 bp, Artificial sequence
  SiRNA target sequence
agacgtagtagtagtagaacc

SEQ ID NO: 307570 - DNA, 21 bp, Artificial sequence
  SiRNA target sequence
gacgtagtagtagtagaacct

SEQ ID NO: 307571 - DNA, 21 bp, Artificial sequence
  SiRNA target sequence
acgtagtagtagtagaaccta

SEQ ID NO: 307572 - DNA, 21 bp, Artificial sequence
  SiRNA target sequence
cgtagtagtagtagaacctaa

SEQ ID NO: 307573 - DNA, 21 bp, Artificial sequence
  SiRNA target sequence
gtagtagtagtagaacctaaa

SEQ ID NO: 307574 - DNA, 21 bp, Artificial sequence
  SiRNA target sequence
tagtagtagtagaacctaaac

SEQ ID NO: 307575 - DNA, 21 bp, Artificial sequence
  SiRNA target sequence
agtagtagtagaacctaaacc

SEQ ID NO: 307576 - DNA, 21 bp, Artificial sequence
  SiRNA target sequence
gtagtagtagaacctaaacca

SEQ ID NO: 307577 - DNA, 21 bp, Artificial sequence
  SiRNA target sequence
tagtagtagaacctaaaccac

SEQ ID NO: 307578 - DNA, 21 bp, Artificial sequence
  SiRNA target sequence
agtagtagaacctaaaccact

SEQ ID NO: 307579 - DNA, 21 bp, Artificial sequence
  SiRNA target sequence
gtagtagaacctaaaccactc

SEQ ID NO: 307580 - DNA, 21 bp, Artificial sequence
  SiRNA target sequence
tagtagaacctaaaccactca

SEQ ID NO: 307581 - DNA, 21 bp, Artificial sequence
  SiRNA target sequence
agtagaacctaaaccactcac

SEQ ID NO: 307582 - DNA, 21 bp, Artificial sequence
  SiRNA target sequence
gtagaacctaaaccactcacc

SEQ ID NO: 307583 - DNA, 21 bp, Artificial sequence
  SiRNA target sequence
tagaacctaaaccactcacct

SEQ ID NO: 307584 - DNA, 21 bp, Artificial sequence
  SiRNA target sequence
agaacctaaaccactcacctc

SEQ ID NO: 307585 - DNA, 21 bp, Artificial sequence
  SiRNA target sequence
gaacctaaaccactcacctca

SEQ ID NO: 307586 - DNA, 21 bp, Artificial sequence
  SiRNA target sequence
aacctaaaccactcacctcag

SEQ ID NO: 307587 - DNA, 21 bp, Artificial sequence
  SiRNA target sequence
acctaaaccactcacctcagg

SEQ ID NO: 307588 - DNA, 21 bp, Artificial sequence
  SiRNA target sequence
cctaaaccactcacctcagga

SEQ ID NO: 307589 - DNA, 21 bp, Artificial sequence
  SiRNA target sequence
ctaaaccactcacctcaggac

SEQ ID NO: 307590 - DNA, 21 bp, Artificial sequence
  SiRNA target sequence
taaaccactcacctcaggacc

SEQ ID NO: 307591 - DNA, 21 bp, Artificial sequence
  SiRNA target sequence
aaaccactcacctcaggaccg

SEQ ID NO: 307592 - DNA, 21 bp, Artificial sequence
  SiRNA target sequence
aaccactcacctcaggaccga

SEQ ID NO: 307593 - DNA, 21 bp, Artificial sequence
  SiRNA target sequence
accactcacctcaggaccgac

SEQ ID NO: 307594 - DNA, 21 bp, Artificial sequence
  SiRNA target sequence
ccactcacctcaggaccgact

SEQ ID NO: 307595 - DNA, 21 bp, Artificial sequence
  SiRNA target sequence
cactcacctcaggaccgactc

SEQ ID NO: 307596 - DNA, 21 bp, Artificial sequence
  SiRNA target sequence
actcacctcaggaccgactca

SEQ ID NO: 307597 - DNA, 21 bp, Artificial sequence
  SiRNA target sequence
ctcacctcaggaccgactcaa

SEQ ID NO: 307598 - DNA, 21 bp, Artificial sequence
  SiRNA target sequence
tcacctcaggaccgactcaag

SEQ ID NO: 307599 - DNA, 21 bp, Artificial sequence
  SiRNA target sequence
cacctcaggaccgactcaagt

SEQ ID NO: 307600 - DNA, 21 bp, Artificial sequence
  SiRNA target sequence
acctcaggaccgactcaagtg

SEQ ID NO: 307601 - DNA, 21 bp, Artificial sequence
  SiRNA target sequence
cctcaggaccgactcaagtgt

SEQ ID NO: 307602 - DNA, 21 bp, Artificial sequence
  SiRNA target sequence
ctcaggaccgactcaagtgta

SEQ ID NO: 307603 - DNA, 21 bp, Artificial sequence
  SiRNA target sequence
tcaggaccgactcaagtgtac

SEQ ID NO: 307604 - DNA, 21 bp, Artificial sequence
  SiRNA target sequence
caggaccgactcaagtgtaca

SEQ ID NO: 307605 - DNA, 21 bp, Artificial sequence
  SiRNA target sequence
aggaccgactcaagtgtacaa

SEQ ID NO: 307606 - DNA, 21 bp, Artificial sequence
  SiRNA target sequence
ggaccgactcaagtgtacaat

SEQ ID NO: 307607 - DNA, 21 bp, Artificial sequence
  SiRNA target sequence
gaccgactcaagtgtacaatc

SEQ ID NO: 307608 - DNA, 21 bp, Artificial sequence
  SiRNA target sequence
accgactcaagtgtacaatcc

SEQ ID NO: 307609 - DNA, 21 bp, Artificial sequence
  SiRNA target sequence
ccgactcaagtgtacaatcca

SEQ ID NO: 307610 - DNA, 21 bp, Artificial sequence
  SiRNA target sequence
cgactcaagtgtacaatccac

SEQ ID NO: 307611 - DNA, 21 bp, Artificial sequence
  SiRNA target sequence
gactcaagtgtacaatccacc

SEQ ID NO: 307612 - DNA, 21 bp, Artificial sequence
  SiRNA target sequence
actcaagtgtacaatccacct

SEQ ID NO: 307613 - DNA, 21 bp, Artificial sequence
  SiRNA target sequence
ctcaagtgtacaatccacctg

SEQ ID NO: 307614 - DNA, 21 bp, Artificial sequence
  SiRNA target sequence
tcaagtgtacaatccacctgc

SEQ ID NO: 307615 - DNA, 21 bp, Artificial sequence
  SiRNA target sequence
caagtgtacaatccacctgca

SEQ ID NO: 307616 - DNA, 21 bp, Artificial sequence
  SiRNA target sequence
aagtgtacaatccacctgcag

SEQ ID NO: 307617 - DNA, 21 bp, Artificial sequence
  SiRNA target sequence
agtgtacaatccacctgcagt

SEQ ID NO: 307618 - DNA, 21 bp, Artificial sequence
  SiRNA target sequence
gtgtacaatccacctgcagta

SEQ ID NO: 307619 - DNA, 21 bp, Artificial sequence
  SiRNA target sequence
tgtacaatccacctgcagtag

SEQ ID NO: 307620 - DNA, 21 bp, Artificial sequence
  SiRNA target sequence
gtacaatccacctgcagtagc

SEQ ID NO: 307621 - DNA, 21 bp, Artificial sequence
  SiRNA target sequence
tacaatccacctgcagtagct

SEQ ID NO: 307622 - DNA, 21 bp, Artificial sequence
  SiRNA target sequence
acaatccacctgcagtagcta

SEQ ID NO: 307623 - DNA, 21 bp, Artificial sequence
  SiRNA target sequence
caatccacctgcagtagctag

SEQ ID NO: 307624 - DNA, 21 bp, Artificial sequence
  SiRNA target sequence
aatccacctgcagtagctaga

SEQ ID NO: 307625 - DNA, 21 bp, Artificial sequence
  SiRNA target sequence
atccacctgcagtagctagag

SEQ ID NO: 307626 - DNA, 21 bp, Artificial sequence
  SiRNA target sequence
tccacctgcagtagctagaga

SEQ ID NO: 307627 - DNA, 21 bp, Artificial sequence
  SiRNA target sequence
ccacctgcagtagctagagac

SEQ ID NO: 307628 - DNA, 21 bp, Artificial sequence
  SiRNA target sequence
cacctgcagtagctagagacc

SEQ ID NO: 307629 - DNA, 21 bp, Artificial sequence
  SiRNA target sequence
acctgcagtagctagagacct

SEQ ID NO: 307630 - DNA, 21 bp, Artificial sequence
  SiRNA target sequence
cctgcagtagctagagaccta

SEQ ID NO: 307631 - DNA, 21 bp, Artificial sequence
  SiRNA target sequence
ctgcagtagctagagacctag

SEQ ID NO: 307632 - DNA, 21 bp, Artificial sequence
  SiRNA target sequence
tgcagtagctagagacctagt

SEQ ID NO: 307633 - DNA, 21 bp, Artificial sequence
  SiRNA target sequence
gcagtagctagagacctagtt

SEQ ID NO: 307634 - DNA, 21 bp, Artificial sequence
  SiRNA target sequence
cagtagctagagacctagtta

SEQ ID NO: 307635 - DNA, 21 bp, Artificial sequence
  SiRNA target sequence
agtagctagagacctagttaa

SEQ ID NO: 307636 - DNA, 21 bp, Artificial sequence
  SiRNA target sequence
gtagctagagacctagttaaa

SEQ ID NO: 307637 - DNA, 21 bp, Artificial sequence
  SiRNA target sequence
tagctagagacctagttaaac

SEQ ID NO: 307638 - DNA, 21 bp, Artificial sequence
  SiRNA target sequence
agctagagacctagttaaaca

SEQ ID NO: 307639 - DNA, 21 bp, Artificial sequence
  SiRNA target sequence
gctagagacctagttaaacag

SEQ ID NO: 307640 - DNA, 21 bp, Artificial sequence
  SiRNA target sequence
ctagagacctagttaaacaga

SEQ ID NO: 307641 - DNA, 21 bp, Artificial sequence
  SiRNA target sequence
tagagacctagttaaacagat

SEQ ID NO: 307642 - DNA, 21 bp, Artificial sequence
  SiRNA target sequence
agagacctagttaaacagatt

SEQ ID NO: 307643 - DNA, 21 bp, Artificial sequence
  SiRNA target sequence
gagacctagttaaacagattg

SEQ ID NO: 307644 - DNA, 21 bp, Artificial sequence
  SiRNA target sequence
agacctagttaaacagattga

SEQ ID NO: 307645 - DNA, 21 bp, Artificial sequence
  SiRNA target sequence
gacctagttaaacagattgat

SEQ ID NO: 307646 - DNA, 21 bp, Artificial sequence
  SiRNA target sequence
acctagttaaacagattgatg

SEQ ID NO: 307647 - DNA, 21 bp, Artificial sequence
  SiRNA target sequence
cctagttaaacagattgatgt

SEQ ID NO: 307648 - DNA, 21 bp, Artificial sequence
  SiRNA target sequence
ctagttaaacagattgatgtt

SEQ ID NO: 307649 - DNA, 21 bp, Artificial sequence
  SiRNA target sequence
tagttaaacagattgatgttt

SEQ ID NO: 307650 - DNA, 21 bp, Artificial sequence
  SiRNA target sequence
agttaaacagattgatgtttc

SEQ ID NO: 307651 - DNA, 21 bp, Artificial sequence
  SiRNA target sequence
gttaaacagattgatgtttca

SEQ ID NO: 307652 - DNA, 21 bp, Artificial sequence
  SiRNA target sequence
ttaaacagattgatgtttcaa

SEQ ID NO: 307653 - DNA, 21 bp, Artificial sequence
  SiRNA target sequence
taaacagattgatgtttcaat

SEQ ID NO: 307654 - DNA, 21 bp, Artificial sequence
  SiRNA target sequence
aaacagattgatgtttcaatg

SEQ ID NO: 307655 - DNA, 21 bp, Artificial sequence
  SiRNA target sequence
aacagattgatgtttcaatgc

SEQ ID NO: 307656 - DNA, 21 bp, Artificial sequence
  SiRNA target sequence
acagattgatgtttcaatgca

SEQ ID NO: 307657 - DNA, 21 bp, Artificial sequence
  SiRNA target sequence
cagattgatgtttcaatgcaa

SEQ ID NO: 307658 - DNA, 21 bp, Artificial sequence
  SiRNA target sequence
agattgatgtttcaatgcaaa

SEQ ID NO: 307659 - DNA, 21 bp, Artificial sequence
  SiRNA target sequence
gattgatgtttcaatgcaaat

SEQ ID NO: 307660 - DNA, 21 bp, Artificial sequence
  SiRNA target sequence
attgatgtttcaatgcaaatt

SEQ ID NO: 307661 - DNA, 21 bp, Artificial sequence
  SiRNA target sequence
ttgatgtttcaatgcaaatta

SEQ ID NO: 307662 - DNA, 21 bp, Artificial sequence
  SiRNA target sequence
tgatgtttcaatgcaaattaa

SEQ ID NO: 307663 - DNA, 21 bp, Artificial sequence
  SiRNA target sequence
gatgtttcaatgcaaattaat

SEQ ID NO: 307664 - DNA, 21 bp, Artificial sequence
  SiRNA target sequence
atgtttcaatgcaaattaatt

SEQ ID NO: 307665 - DNA, 21 bp, Artificial sequence
  SiRNA target sequence
tgtttcaatgcaaattaattt

SEQ ID NO: 307666 - DNA, 21 bp, Artificial sequence
  SiRNA target sequence
gtttcaatgcaaattaattta

SEQ ID NO: 307667 - DNA, 21 bp, Artificial sequence
  SiRNA target sequence
tttcaatgcaaattaatttaa

SEQ ID NO: 307668 - DNA, 21 bp, Artificial sequence
  SiRNA target sequence
ttcaatgcaaattaatttaag

SEQ ID NO: 307669 - DNA, 21 bp, Artificial sequence
  SiRNA target sequence
tcaatgcaaattaatttaagt

SEQ ID NO: 307670 - DNA, 21 bp, Artificial sequence
  SiRNA target sequence
caatgcaaattaatttaagta

SEQ ID NO: 307671 - DNA, 21 bp, Artificial sequence
  SiRNA target sequence
aatgcaaattaatttaagtaa

SEQ ID NO: 307672 - DNA, 21 bp, Artificial sequence
  SiRNA target sequence
atgcaaattaatttaagtaac

SEQ ID NO: 307673 - DNA, 21 bp, Artificial sequence
  SiRNA target sequence
tgcaaattaatttaagtaaca

SEQ ID NO: 307674 - DNA, 21 bp, Artificial sequence
  SiRNA target sequence
gcaaattaatttaagtaacaa

SEQ ID NO: 307675 - DNA, 21 bp, Artificial sequence
  SiRNA target sequence
caaattaatttaagtaacaag

SEQ ID NO: 307676 - DNA, 21 bp, Artificial sequence
  SiRNA target sequence
aaattaatttaagtaacaaga

SEQ ID NO: 307677 - DNA, 21 bp, Artificial sequence
  SiRNA target sequence
aattaatttaagtaacaagac

SEQ ID NO: 307678 - DNA, 21 bp, Artificial sequence
  SiRNA target sequence
attaatttaagtaacaagact

SEQ ID NO: 307679 - DNA, 21 bp, Artificial sequence
  SiRNA target sequence
ttaatttaagtaacaagactg

SEQ ID NO: 307680 - DNA, 21 bp, Artificial sequence
  SiRNA target sequence
taatttaagtaacaagactga

SEQ ID NO: 307681 - DNA, 21 bp, Artificial sequence
  SiRNA target sequence
aatttaagtaacaagactgac

SEQ ID NO: 307682 - DNA, 21 bp, Artificial sequence
  SiRNA target sequence
atttaagtaacaagactgacg

SEQ ID NO: 307683 - DNA, 21 bp, Artificial sequence
  SiRNA target sequence
tttaagtaacaagactgacga

SEQ ID NO: 307684 - DNA, 21 bp, Artificial sequence
  SiRNA target sequence
ttaagtaacaagactgacgaa

SEQ ID NO: 307685 - DNA, 21 bp, Artificial sequence
  SiRNA target sequence
taagtaacaagactgacgaaa

SEQ ID NO: 307686 - DNA, 21 bp, Artificial sequence
  SiRNA target sequence
aagtaacaagactgacgaaaa

SEQ ID NO: 307687 - DNA, 21 bp, Artificial sequence
  SiRNA target sequence
agtaacaagactgacgaaaac

SEQ ID NO: 307688 - DNA, 21 bp, Artificial sequence
  SiRNA target sequence
gtaacaagactgacgaaaaca

SEQ ID NO: 307689 - DNA, 21 bp, Artificial sequence
  SiRNA target sequence
taacaagactgacgaaaacac

SEQ ID NO: 307690 - DNA, 21 bp, Artificial sequence
  SiRNA target sequence
aacaagactgacgaaaacaca

SEQ ID NO: 307691 - DNA, 21 bp, Artificial sequence
  SiRNA target sequence
acaagactgacgaaaacacaa

SEQ ID NO: 307692 - DNA, 21 bp, Artificial sequence
  SiRNA target sequence
caagactgacgaaaacacaat

SEQ ID NO: 307693 - DNA, 21 bp, Artificial sequence
  SiRNA target sequence
aagactgacgaaaacacaatc

SEQ ID NO: 307694 - DNA, 21 bp, Artificial sequence
  SiRNA target sequence
agactgacgaaaacacaatct

SEQ ID NO: 307695 - DNA, 21 bp, Artificial sequence
  SiRNA target sequence
gactgacgaaaacacaatctc

SEQ ID NO: 307696 - DNA, 21 bp, Artificial sequence
  SiRNA target sequence
actgacgaaaacacaatctct

SEQ ID NO: 307697 - DNA, 21 bp, Artificial sequence
  SiRNA target sequence
ctgacgaaaacacaatctctt

SEQ ID NO: 307698 - DNA, 21 bp, Artificial sequence
  SiRNA target sequence
tgacgaaaacacaatctcttt

SEQ ID NO: 307699 - DNA, 21 bp, Artificial sequence
  SiRNA target sequence
gacgaaaacacaatctctttc

SEQ ID NO: 307700 - DNA, 21 bp, Artificial sequence
  SiRNA target sequence
acgaaaacacaatctctttct

SEQ ID NO: 307701 - DNA, 21 bp, Artificial sequence
  SiRNA target sequence
cgaaaacacaatctctttctt

SEQ ID NO: 307702 - DNA, 21 bp, Artificial sequence
  SiRNA target sequence
gaaaacacaatctctttcttt

SEQ ID NO: 307703 - DNA, 21 bp, Artificial sequence
  SiRNA target sequence
aaaacacaatctctttctttg

SEQ ID NO: 307704 - DNA, 21 bp, Artificial sequence
  SiRNA target sequence
aaacacaatctctttctttga

SEQ ID NO: 307705 - DNA, 21 bp, Artificial sequence
  SiRNA target sequence
aacacaatctctttctttgac

SEQ ID NO: 307706 - DNA, 21 bp, Artificial sequence
  SiRNA target sequence
acacaatctctttctttgact

SEQ ID NO: 307707 - DNA, 21 bp, Artificial sequence
  SiRNA target sequence
cacaatctctttctttgactc

SEQ ID NO: 307708 - DNA, 21 bp, Artificial sequence
  SiRNA target sequence
acaatctctttctttgactca

SEQ ID NO: 307709 - DNA, 21 bp, Artificial sequence
  SiRNA target sequence
caatctctttctttgactcag

SEQ ID NO: 307710 - DNA, 21 bp, Artificial sequence
  SiRNA target sequence
aatctctttctttgactcagg

SEQ ID NO: 307711 - DNA, 21 bp, Artificial sequence
  SiRNA target sequence
atctctttctttgactcaggc

SEQ ID NO: 307712 - DNA, 21 bp, Artificial sequence
  SiRNA target sequence
tctctttctttgactcaggcg

SEQ ID NO: 307713 - DNA, 21 bp, Artificial sequence
  SiRNA target sequence
ctctttctttgactcaggcga

SEQ ID NO: 307714 - DNA, 21 bp, Artificial sequence
  SiRNA target sequence
tctttctttgactcaggcgac

SEQ ID NO: 307715 - DNA, 21 bp, Artificial sequence
  SiRNA target sequence
ctttctttgactcaggcgacc

SEQ ID NO: 307716 - DNA, 21 bp, Artificial sequence
  SiRNA target sequence
tttctttgactcaggcgaccc

SEQ ID NO: 307717 - DNA, 21 bp, Artificial sequence
  SiRNA target sequence
ttctttgactcaggcgaccca

SEQ ID NO: 307718 - DNA, 21 bp, Artificial sequence
  SiRNA target sequence
tctttgactcaggcgacccag

SEQ ID NO: 307719 - DNA, 21 bp, Artificial sequence
  SiRNA target sequence
ctttgactcaggcgacccaga

SEQ ID NO: 307720 - DNA, 21 bp, Artificial sequence
  SiRNA target sequence
tttgactcaggcgacccagaa

SEQ ID NO: 307721 - DNA, 21 bp, Artificial sequence
  SiRNA target sequence
ttgactcaggcgacccagaac

SEQ ID NO: 307722 - DNA, 21 bp, Artificial sequence
  SiRNA target sequence
tgactcaggcgacccagaacg

SEQ ID NO: 307723 - DNA, 21 bp, Artificial sequence
  SiRNA target sequence
gactcaggcgacccagaacga

SEQ ID NO: 307724 - DNA, 21 bp, Artificial sequence
  SiRNA target sequence
actcaggcgacccagaacgaa

SEQ ID NO: 307725 - DNA, 21 bp, Artificial sequence
  SiRNA target sequence
ctcaggcgacccagaacgaat

SEQ ID NO: 307726 - DNA, 21 bp, Artificial sequence
  SiRNA target sequence
tcaggcgacccagaacgaatg

SEQ ID NO: 307727 - DNA, 21 bp, Artificial sequence
  SiRNA target sequence
caggcgacccagaacgaatga

SEQ ID NO: 307728 - DNA, 21 bp, Artificial sequence
  SiRNA target sequence
aggcgacccagaacgaatgaa

SEQ ID NO: 307729 - DNA, 21 bp, Artificial sequence
  SiRNA target sequence
ggcgacccagaacgaatgaat

SEQ ID NO: 307730 - DNA, 21 bp, Artificial sequence
  SiRNA target sequence
gcgacccagaacgaatgaata

SEQ ID NO: 307731 - DNA, 21 bp, Artificial sequence
  SiRNA target sequence
cgacccagaacgaatgaataa

SEQ ID NO: 307732 - DNA, 21 bp, Artificial sequence
  SiRNA target sequence
gacccagaacgaatgaataat

SEQ ID NO: 307733 - DNA, 21 bp, Artificial sequence
  SiRNA target sequence
acccagaacgaatgaataatg

SEQ ID NO: 307734 - DNA, 21 bp, Artificial sequence
  SiRNA target sequence
cccagaacgaatgaataatga

SEQ ID NO: 307735 - DNA, 21 bp, Artificial sequence
  SiRNA target sequence
ccagaacgaatgaataatgag

SEQ ID NO: 307736 - DNA, 21 bp, Artificial sequence
  SiRNA target sequence
cagaacgaatgaataatgagg

SEQ ID NO: 307737 - DNA, 21 bp, Artificial sequence
  SiRNA target sequence
agaacgaatgaataatgaggc

SEQ ID NO: 307738 - DNA, 21 bp, Artificial sequence
  SiRNA target sequence
gaacgaatgaataatgaggct

SEQ ID NO: 307739 - DNA, 21 bp, Artificial sequence
  SiRNA target sequence
aacgaatgaataatgaggctc

SEQ ID NO: 307740 - DNA, 21 bp, Artificial sequence
  SiRNA target sequence
acgaatgaataatgaggctct

SEQ ID NO: 307741 - DNA, 21 bp, Artificial sequence
  SiRNA target sequence
cgaatgaataatgaggctctc

SEQ ID NO: 307742 - DNA, 21 bp, Artificial sequence
  SiRNA target sequence
gaatgaataatgaggctctca

SEQ ID NO: 307743 - DNA, 21 bp, Artificial sequence
  SiRNA target sequence
aatgaataatgaggctctcat

SEQ ID NO: 307744 - DNA, 21 bp, Artificial sequence
  SiRNA target sequence
atgaataatgaggctctcatg

SEQ ID NO: 307745 - DNA, 21 bp, Artificial sequence
  SiRNA target sequence
tgaataatgaggctctcatga

SEQ ID NO: 307746 - DNA, 21 bp, Artificial sequence
  SiRNA target sequence
gaataatgaggctctcatgag

SEQ ID NO: 307747 - DNA, 21 bp, Artificial sequence
  SiRNA target sequence
aataatgaggctctcatgagg

SEQ ID NO: 307748 - DNA, 21 bp, Artificial sequence
  SiRNA target sequence
ataatgaggctctcatgaggg

SEQ ID NO: 307749 - DNA, 21 bp, Artificial sequence
  SiRNA target sequence
taatgaggctctcatgagggg

SEQ ID NO: 307750 - DNA, 21 bp, Artificial sequence
  SiRNA target sequence
aatgaggctctcatgagggga

SEQ ID NO: 307751 - DNA, 21 bp, Artificial sequence
  SiRNA target sequence
atgaggctctcatgaggggat

SEQ ID NO: 307752 - DNA, 21 bp, Artificial sequence
  SiRNA target sequence
tgaggctctcatgaggggatg

SEQ ID NO: 307753 - DNA, 21 bp, Artificial sequence
  SiRNA target sequence
gaggctctcatgaggggatgt

SEQ ID NO: 307754 - DNA, 21 bp, Artificial sequence
  SiRNA target sequence
aggctctcatgaggggatgtg

SEQ ID NO: 307755 - DNA, 21 bp, Artificial sequence
  SiRNA target sequence
ggctctcatgaggggatgtgg

SEQ ID NO: 307756 - DNA, 21 bp, Artificial sequence
  SiRNA target sequence
gctctcatgaggggatgtggc

SEQ ID NO: 307757 - DNA, 21 bp, Artificial sequence
  SiRNA target sequence
ctctcatgaggggatgtggcg

SEQ ID NO: 307758 - DNA, 21 bp, Artificial sequence
  SiRNA target sequence
tctcatgaggggatgtggcga

SEQ ID NO: 307759 - DNA, 21 bp, Artificial sequence
  SiRNA target sequence
ctcatgaggggatgtggcgaa

SEQ ID NO: 307760 - DNA, 21 bp, Artificial sequence
  SiRNA target sequence
tcatgaggggatgtggcgaac

SEQ ID NO: 307761 - DNA, 21 bp, Artificial sequence
  SiRNA target sequence
catgaggggatgtggcgaaca

SEQ ID NO: 307762 - DNA, 21 bp, Artificial sequence
  SiRNA target sequence
atgaggggatgtggcgaacag

SEQ ID NO: 307763 - DNA, 21 bp, Artificial sequence
  SiRNA target sequence
tgaggggatgtggcgaacaga

SEQ ID NO: 307764 - DNA, 21 bp, Artificial sequence
  SiRNA target sequence
gaggggatgtggcgaacagat

SEQ ID NO: 307765 - DNA, 21 bp, Artificial sequence
  SiRNA target sequence
aggggatgtggcgaacagata

SEQ ID NO: 307766 - DNA, 21 bp, Artificial sequence
  SiRNA target sequence
ggggatgtggcgaacagatag

SEQ ID NO: 307767 - DNA, 21 bp, Artificial sequence
  SiRNA target sequence
gggatgtggcgaacagatagt

SEQ ID NO: 307768 - DNA, 21 bp, Artificial sequence
  SiRNA target sequence
ggatgtggcgaacagatagta

SEQ ID NO: 307769 - DNA, 21 bp, Artificial sequence
  SiRNA target sequence
gatgtggcgaacagatagtaa

SEQ ID NO: 307770 - DNA, 21 bp, Artificial sequence
  SiRNA target sequence
atgtggcgaacagatagtaaa

SEQ ID NO: 307771 - DNA, 21 bp, Artificial sequence
  SiRNA target sequence
tgtggcgaacagatagtaaat

SEQ ID NO: 307772 - DNA, 21 bp, Artificial sequence
  SiRNA target sequence
gtggcgaacagatagtaaatt

SEQ ID NO: 307773 - DNA, 21 bp, Artificial sequence
  SiRNA target sequence
tggcgaacagatagtaaattt

SEQ ID NO: 307774 - DNA, 21 bp, Artificial sequence
  SiRNA target sequence
ggcgaacagatagtaaattta

SEQ ID NO: 307775 - DNA, 21 bp, Artificial sequence
  SiRNA target sequence
gcgaacagatagtaaatttaa

SEQ ID NO: 307776 - DNA, 21 bp, Artificial sequence
  SiRNA target sequence
cgaacagatagtaaatttaag

SEQ ID NO: 307777 - DNA, 21 bp, Artificial sequence
  SiRNA target sequence
gaacagatagtaaatttaaga

SEQ ID NO: 307778 - DNA, 21 bp, Artificial sequence
  SiRNA target sequence
aacagatagtaaatttaagac

SEQ ID NO: 307779 - DNA, 21 bp, Artificial sequence
  SiRNA target sequence
acagatagtaaatttaagacc

SEQ ID NO: 307780 - DNA, 21 bp, Artificial sequence
  SiRNA target sequence
cagatagtaaatttaagaccc

SEQ ID NO: 307781 - DNA, 21 bp, Artificial sequence
  SiRNA target sequence
agatagtaaatttaagaccct

SEQ ID NO: 307782 - DNA, 21 bp, Artificial sequence
  SiRNA target sequence
gatagtaaatttaagaccctt

SEQ ID NO: 307783 - DNA, 21 bp, Artificial sequence
  SiRNA target sequence
atagtaaatttaagaccctta

SEQ ID NO: 307784 - DNA, 21 bp, Artificial sequence
  SiRNA target sequence
tagtaaatttaagacccttac

SEQ ID NO: 307785 - DNA, 21 bp, Artificial sequence
  SiRNA target sequence
agtaaatttaagacccttact

SEQ ID NO: 307786 - DNA, 21 bp, Artificial sequence
  SiRNA target sequence
gtaaatttaagacccttactt

SEQ ID NO: 307787 - DNA, 21 bp, Artificial sequence
  SiRNA target sequence
taaatttaagacccttacttc

SEQ ID NO: 307788 - DNA, 21 bp, Artificial sequence
  SiRNA target sequence
aaatttaagacccttacttcg

SEQ ID NO: 307789 - DNA, 21 bp, Artificial sequence
  SiRNA target sequence
aatttaagacccttacttcgc

SEQ ID NO: 307790 - DNA, 21 bp, Artificial sequence
  SiRNA target sequence
atttaagacccttacttcgca

SEQ ID NO: 307791 - DNA, 21 bp, Artificial sequence
  SiRNA target sequence
tttaagacccttacttcgcac

SEQ ID NO: 307792 - DNA, 21 bp, Artificial sequence
  SiRNA target sequence
ttaagacccttacttcgcaca

SEQ ID NO: 307793 - DNA, 21 bp, Artificial sequence
  SiRNA target sequence
taagacccttacttcgcacat

SEQ ID NO: 307794 - DNA, 21 bp, Artificial sequence
  SiRNA target sequence
aagacccttacttcgcacatt

SEQ ID NO: 307795 - DNA, 21 bp, Artificial sequence
  SiRNA target sequence
agacccttacttcgcacattc

SEQ ID NO: 307796 - DNA, 21 bp, Artificial sequence
  SiRNA target sequence
gacccttacttcgcacattcc

SEQ ID NO: 307797 - DNA, 21 bp, Artificial sequence
  SiRNA target sequence
acccttacttcgcacattccg

SEQ ID NO: 307798 - DNA, 21 bp, Artificial sequence
  SiRNA target sequence
cccttacttcgcacattccga

SEQ ID NO: 307799 - DNA, 21 bp, Artificial sequence
  SiRNA target sequence
ccttacttcgcacattccgaa

SEQ ID NO: 307800 - DNA, 21 bp, Artificial sequence
  SiRNA target sequence
cttacttcgcacattccgaac

SEQ ID NO: 307801 - DNA, 21 bp, Artificial sequence
  SiRNA target sequence
ttacttcgcacattccgaaca

SEQ ID NO: 307802 - DNA, 21 bp, Artificial sequence
  SiRNA target sequence
tacttcgcacattccgaacaa

SEQ ID NO: 307803 - DNA, 21 bp, Artificial sequence
  SiRNA target sequence
acttcgcacattccgaacaat

SEQ ID NO: 307804 - DNA, 21 bp, Artificial sequence
  SiRNA target sequence
cttcgcacattccgaacaata

SEQ ID NO: 307805 - DNA, 21 bp, Artificial sequence
  SiRNA target sequence
ttcgcacattccgaacaataa

SEQ ID NO: 307806 - DNA, 21 bp, Artificial sequence
  SiRNA target sequence
tcgcacattccgaacaataaa

SEQ ID NO: 307807 - DNA, 21 bp, Artificial sequence
  SiRNA target sequence
cgcacattccgaacaataaat

SEQ ID NO: 307808 - DNA, 21 bp, Artificial sequence
  SiRNA target sequence
gcacattccgaacaataaatg

SEQ ID NO: 307809 - DNA, 21 bp, Artificial sequence
  SiRNA target sequence
cacattccgaacaataaatga

SEQ ID NO: 307810 - DNA, 21 bp, Artificial sequence
  SiRNA target sequence
acattccgaacaataaatgat

SEQ ID NO: 307811 - DNA, 21 bp, Artificial sequence
  SiRNA target sequence
cattccgaacaataaatgata

SEQ ID NO: 307812 - DNA, 21 bp, Artificial sequence
  SiRNA target sequence
attccgaacaataaatgataa

SEQ ID NO: 307813 - DNA, 21 bp, Artificial sequence
  SiRNA target sequence
ttccgaacaataaatgataac

SEQ ID NO: 307814 - DNA, 21 bp, Artificial sequence
  SiRNA target sequence
tccgaacaataaatgataact

SEQ ID NO: 307815 - DNA, 21 bp, Artificial sequence
  SiRNA target sequence
ccgaacaataaatgataactg

SEQ ID NO: 307816 - DNA, 21 bp, Artificial sequence
  SiRNA target sequence
cgaacaataaatgataactgg

SEQ ID NO: 307817 - DNA, 21 bp, Artificial sequence
  SiRNA target sequence
gaacaataaatgataactgga

SEQ ID NO: 307818 - DNA, 21 bp, Artificial sequence
  SiRNA target sequence
aacaataaatgataactggag

SEQ ID NO: 307819 - DNA, 21 bp, Artificial sequence
  SiRNA target sequence
acaataaatgataactggagt

SEQ ID NO: 307820 - DNA, 21 bp, Artificial sequence
  SiRNA target sequence
caataaatgataactggagtt

SEQ ID NO: 307821 - DNA, 21 bp, Artificial sequence
  SiRNA target sequence
aataaatgataactggagttt

SEQ ID NO: 307822 - DNA, 21 bp, Artificial sequence
  SiRNA target sequence
ataaatgataactggagtttg

SEQ ID NO: 307823 - DNA, 21 bp, Artificial sequence
  SiRNA target sequence
taaatgataactggagtttgg

SEQ ID NO: 307824 - DNA, 21 bp, Artificial sequence
  SiRNA target sequence
aaatgataactggagtttggc

SEQ ID NO: 307825 - DNA, 21 bp, Artificial sequence
  SiRNA target sequence
aatgataactggagtttggca

SEQ ID NO: 307826 - DNA, 21 bp, Artificial sequence
  SiRNA target sequence
atgataactggagtttggcag

SEQ ID NO: 307827 - DNA, 21 bp, Artificial sequence
  SiRNA target sequence
tgataactggagtttggcagc

SEQ ID NO: 307828 - DNA, 21 bp, Artificial sequence
  SiRNA target sequence
gataactggagtttggcagca

SEQ ID NO: 307829 - DNA, 21 bp, Artificial sequence
  SiRNA target sequence
ataactggagtttggcagcaa

SEQ ID NO: 307830 - DNA, 21 bp, Artificial sequence
  SiRNA target sequence
taactggagtttggcagcaaa

SEQ ID NO: 307831 - DNA, 21 bp, Artificial sequence
  SiRNA target sequence
aactggagtttggcagcaaac

SEQ ID NO: 307832 - DNA, 21 bp, Artificial sequence
  SiRNA target sequence
actggagtttggcagcaaaca

SEQ ID NO: 307833 - DNA, 21 bp, Artificial sequence
  SiRNA target sequence
ctggagtttggcagcaaacac

SEQ ID NO: 307834 - DNA, 21 bp, Artificial sequence
  SiRNA target sequence
tggagtttggcagcaaacacc

SEQ ID NO: 307835 - DNA, 21 bp, Artificial sequence
  SiRNA target sequence
ggagtttggcagcaaacacca

SEQ ID NO: 307836 - DNA, 21 bp, Artificial sequence
  SiRNA target sequence
gagtttggcagcaaacaccaa

SEQ ID NO: 307837 - DNA, 21 bp, Artificial sequence
  SiRNA target sequence
agtttggcagcaaacaccaag

SEQ ID NO: 307838 - DNA, 21 bp, Artificial sequence
  SiRNA target sequence
gtttggcagcaaacaccaaga

SEQ ID NO: 307839 - DNA, 21 bp, Artificial sequence
  SiRNA target sequence
tttggcagcaaacaccaagac

SEQ ID NO: 307840 - DNA, 21 bp, Artificial sequence
  SiRNA target sequence
ttggcagcaaacaccaagaca

SEQ ID NO: 307841 - DNA, 21 bp, Artificial sequence
  SiRNA target sequence
tggcagcaaacaccaagacac

SEQ ID NO: 307842 - DNA, 21 bp, Artificial sequence
  SiRNA target sequence
ggcagcaaacaccaagacacc

SEQ ID NO: 307843 - DNA, 21 bp, Artificial sequence
  SiRNA target sequence
gcagcaaacaccaagacaccg

SEQ ID NO: 307844 - DNA, 21 bp, Artificial sequence
  SiRNA target sequence
cagcaaacaccaagacaccga

SEQ ID NO: 307845 - DNA, 21 bp, Artificial sequence
  SiRNA target sequence
agcaaacaccaagacaccgat

SEQ ID NO: 307846 - DNA, 21 bp, Artificial sequence
  SiRNA target sequence
gcaaacaccaagacaccgatc

SEQ ID NO: 307847 - DNA, 21 bp, Artificial sequence
  SiRNA target sequence
caaacaccaagacaccgatca

SEQ ID NO: 307848 - DNA, 21 bp, Artificial sequence
  SiRNA target sequence
aaacaccaagacaccgatcac

SEQ ID NO: 307849 - DNA, 21 bp, Artificial sequence
  SiRNA target sequence
aacaccaagacaccgatcaca

SEQ ID NO: 307850 - DNA, 21 bp, Artificial sequence
  SiRNA target sequence
acaccaagacaccgatcacag

SEQ ID NO: 307851 - DNA, 21 bp, Artificial sequence
  SiRNA target sequence
caccaagacaccgatcacaga

SEQ ID NO: 307852 - DNA, 21 bp, Artificial sequence
  SiRNA target sequence
accaagacaccgatcacagac

SEQ ID NO: 307853 - DNA, 21 bp, Artificial sequence
  SiRNA target sequence
ccaagacaccgatcacagacc

SEQ ID NO: 307854 - DNA, 21 bp, Artificial sequence
  SiRNA target sequence
caagacaccgatcacagacct

SEQ ID NO: 307855 - DNA, 21 bp, Artificial sequence
  SiRNA target sequence
aagacaccgatcacagaccta

SEQ ID NO: 307856 - DNA, 21 bp, Artificial sequence
  SiRNA target sequence
agacaccgatcacagacctaa

SEQ ID NO: 307857 - DNA, 21 bp, Artificial sequence
  SiRNA target sequence
gacaccgatcacagacctaac

SEQ ID NO: 307858 - DNA, 21 bp, Artificial sequence
  SiRNA target sequence
acaccgatcacagacctaaca

SEQ ID NO: 307859 - DNA, 21 bp, Artificial sequence
  SiRNA target sequence
caccgatcacagacctaacaa

SEQ ID NO: 307860 - DNA, 21 bp, Artificial sequence
  SiRNA target sequence
accgatcacagacctaacaaa

SEQ ID NO: 307861 - DNA, 21 bp, Artificial sequence
  SiRNA target sequence
ccgatcacagacctaacaaac

SEQ ID NO: 307862 - DNA, 21 bp, Artificial sequence
  SiRNA target sequence
cgatcacagacctaacaaaca

SEQ ID NO: 307863 - DNA, 21 bp, Artificial sequence
  SiRNA target sequence
gatcacagacctaacaaacac

SEQ ID NO: 307864 - DNA, 21 bp, Artificial sequence
  SiRNA target sequence
atcacagacctaacaaacacc

SEQ ID NO: 307865 - DNA, 21 bp, Artificial sequence
  SiRNA target sequence
tcacagacctaacaaacaccg

SEQ ID NO: 307866 - DNA, 21 bp, Artificial sequence
  SiRNA target sequence
cacagacctaacaaacaccgc

SEQ ID NO: 307867 - DNA, 21 bp, Artificial sequence
  SiRNA target sequence
acagacctaacaaacaccgca

SEQ ID NO: 307868 - DNA, 21 bp, Artificial sequence
  SiRNA target sequence
cagacctaacaaacaccgcag

SEQ ID NO: 307869 - DNA, 21 bp, Artificial sequence
  SiRNA target sequence
agacctaacaaacaccgcaga

SEQ ID NO: 307870 - DNA, 21 bp, Artificial sequence
  SiRNA target sequence
gacctaacaaacaccgcagat

SEQ ID NO: 307871 - DNA, 21 bp, Artificial sequence
  SiRNA target sequence
acctaacaaacaccgcagatg

SEQ ID NO: 307872 - DNA, 21 bp, Artificial sequence
  SiRNA target sequence
cctaacaaacaccgcagatgc

SEQ ID NO: 307873 - DNA, 21 bp, Artificial sequence
  SiRNA target sequence
ctaacaaacaccgcagatgct

SEQ ID NO: 307874 - DNA, 21 bp, Artificial sequence
  SiRNA target sequence
taacaaacaccgcagatgctg

SEQ ID NO: 307875 - DNA, 21 bp, Artificial sequence
  SiRNA target sequence
aacaaacaccgcagatgctga

SEQ ID NO: 307876 - DNA, 21 bp, Artificial sequence
  SiRNA target sequence
acaaacaccgcagatgctgaa

SEQ ID NO: 307877 - DNA, 21 bp, Artificial sequence
  SiRNA target sequence
caaacaccgcagatgctgaag

SEQ ID NO: 307878 - DNA, 21 bp, Artificial sequence
  SiRNA target sequence
aaacaccgcagatgctgaagg

SEQ ID NO: 307879 - DNA, 21 bp, Artificial sequence
  SiRNA target sequence
aacaccgcagatgctgaaggc

SEQ ID NO: 307880 - DNA, 21 bp, Artificial sequence
  SiRNA target sequence
acaccgcagatgctgaaggcc

SEQ ID NO: 307881 - DNA, 21 bp, Artificial sequence
  SiRNA target sequence
caccgcagatgctgaaggccg

SEQ ID NO: 307882 - DNA, 21 bp, Artificial sequence
  SiRNA target sequence
accgcagatgctgaaggccga

SEQ ID NO: 307883 - DNA, 21 bp, Artificial sequence
  SiRNA target sequence
ccgcagatgctgaaggccgag

SEQ ID NO: 307884 - DNA, 21 bp, Artificial sequence
  SiRNA target sequence
cgcagatgctgaaggccgaga

SEQ ID NO: 307885 - DNA, 21 bp, Artificial sequence
  SiRNA target sequence
gcagatgctgaaggccgagac

SEQ ID NO: 307886 - DNA, 21 bp, Artificial sequence
  SiRNA target sequence
cagatgctgaaggccgagact

SEQ ID NO: 307887 - DNA, 21 bp, Artificial sequence
  SiRNA target sequence
agatgctgaaggccgagacta

SEQ ID NO: 307888 - DNA, 21 bp, Artificial sequence
  SiRNA target sequence
gatgctgaaggccgagactat

SEQ ID NO: 307889 - DNA, 21 bp, Artificial sequence
  SiRNA target sequence
atgctgaaggccgagactata

SEQ ID NO: 307890 - DNA, 21 bp, Artificial sequence
  SiRNA target sequence
tgctgaaggccgagactatat

SEQ ID NO: 307891 - DNA, 21 bp, Artificial sequence
  SiRNA target sequence
gctgaaggccgagactatatg

SEQ ID NO: 307892 - DNA, 21 bp, Artificial sequence
  SiRNA target sequence
ctgaaggccgagactatatgt

SEQ ID NO: 307893 - DNA, 21 bp, Artificial sequence
  SiRNA target sequence
tgaaggccgagactatatgtc

SEQ ID NO: 307894 - DNA, 21 bp, Artificial sequence
  SiRNA target sequence
gaaggccgagactatatgtct

SEQ ID NO: 307895 - DNA, 21 bp, Artificial sequence
  SiRNA target sequence
aaggccgagactatatgtctt

SEQ ID NO: 307896 - DNA, 21 bp, Artificial sequence
  SiRNA target sequence
aggccgagactatatgtctta

SEQ ID NO: 307897 - DNA, 21 bp, Artificial sequence
  SiRNA target sequence
ggccgagactatatgtcttat

SEQ ID NO: 307898 - DNA, 21 bp, Artificial sequence
  SiRNA target sequence
gccgagactatatgtcttatc

SEQ ID NO: 307899 - DNA, 21 bp, Artificial sequence
  SiRNA target sequence
ccgagactatatgtcttatct

SEQ ID NO: 307900 - DNA, 21 bp, Artificial sequence
  SiRNA target sequence
cgagactatatgtcttatctt

SEQ ID NO: 307901 - DNA, 21 bp, Artificial sequence
  SiRNA target sequence
gagactatatgtcttatcttt

SEQ ID NO: 307902 - DNA, 21 bp, Artificial sequence
  SiRNA target sequence
agactatatgtcttatctttc

SEQ ID NO: 307903 - DNA, 21 bp, Artificial sequence
  SiRNA target sequence
gactatatgtcttatctttct

SEQ ID NO: 307904 - DNA, 21 bp, Artificial sequence
  SiRNA target sequence
actatatgtcttatctttctt

SEQ ID NO: 307905 - DNA, 21 bp, Artificial sequence
  SiRNA target sequence
ctatatgtcttatctttcttt

SEQ ID NO: 307906 - DNA, 21 bp, Artificial sequence
  SiRNA target sequence
tatatgtcttatctttctttt

SEQ ID NO: 307907 - DNA, 21 bp, Artificial sequence
  SiRNA target sequence
atatgtcttatctttcttttc

SEQ ID NO: 307908 - DNA, 21 bp, Artificial sequence
  SiRNA target sequence
tatgtcttatctttcttttct

SEQ ID NO: 307909 - DNA, 21 bp, Artificial sequence
  SiRNA target sequence
atgtcttatctttcttttctt

SEQ ID NO: 307910 - DNA, 21 bp, Artificial sequence
  SiRNA target sequence
tgtcttatctttcttttcttt

SEQ ID NO: 307911 - DNA, 21 bp, Artificial sequence
  SiRNA target sequence
gtcttatctttcttttcttta

SEQ ID NO: 307912 - DNA, 21 bp, Artificial sequence
  SiRNA target sequence
tcttatctttcttttctttat

SEQ ID NO: 307913 - DNA, 21 bp, Artificial sequence
  SiRNA target sequence
cttatctttcttttctttata

SEQ ID NO: 307914 - DNA, 21 bp, Artificial sequence
  SiRNA target sequence
ttatctttcttttctttatag

SEQ ID NO: 307915 - DNA, 21 bp, Artificial sequence
  SiRNA target sequence
tatctttcttttctttataga

SEQ ID NO: 307916 - DNA, 21 bp, Artificial sequence
  SiRNA target sequence
atctttcttttctttatagat

SEQ ID NO: 307917 - DNA, 21 bp, Artificial sequence
  SiRNA target sequence
tctttcttttctttatagatt

SEQ ID NO: 307918 - DNA, 21 bp, Artificial sequence
  SiRNA target sequence
ctttcttttctttatagattt

SEQ ID NO: 307919 - DNA, 21 bp, Artificial sequence
  SiRNA target sequence
tttcttttctttatagatttt

SEQ ID NO: 307920 - DNA, 21 bp, Artificial sequence
  SiRNA target sequence
ttcttttctttatagatttta

SEQ ID NO: 307921 - DNA, 21 bp, Artificial sequence
  SiRNA target sequence
tcttttctttatagattttat

SEQ ID NO: 307922 - DNA, 21 bp, Artificial sequence
  SiRNA target sequence
cttttctttatagattttatc

SEQ ID NO: 307923 - DNA, 21 bp, Artificial sequence
  SiRNA target sequence
ttttctttatagattttatcg

SEQ ID NO: 307924 - DNA, 21 bp, Artificial sequence
  SiRNA target sequence
tttctttatagattttatcga

SEQ ID NO: 307925 - DNA, 21 bp, Artificial sequence
  SiRNA target sequence
ttctttatagattttatcgag

SEQ ID NO: 307926 - DNA, 21 bp, Artificial sequence
  SiRNA target sequence
tctttatagattttatcgagg

SEQ ID NO: 307927 - DNA, 21 bp, Artificial sequence
  SiRNA target sequence
ctttatagattttatcgagga

SEQ ID NO: 307928 - DNA, 21 bp, Artificial sequence
  SiRNA target sequence
tttatagattttatcgaggag

SEQ ID NO: 307929 - DNA, 21 bp, Artificial sequence
  SiRNA target sequence
ttatagattttatcgaggagg

SEQ ID NO: 307930 - DNA, 21 bp, Artificial sequence
  SiRNA target sequence
tatagattttatcgaggaggt

SEQ ID NO: 307931 - DNA, 21 bp, Artificial sequence
  SiRNA target sequence
atagattttatcgaggaggta

SEQ ID NO: 307932 - DNA, 21 bp, Artificial sequence
  SiRNA target sequence
tagattttatcgaggaggtag

SEQ ID NO: 307933 - DNA, 21 bp, Artificial sequence
  SiRNA target sequence
agattttatcgaggaggtaga

SEQ ID NO: 307934 - DNA, 21 bp, Artificial sequence
  SiRNA target sequence
gattttatcgaggaggtagac

SEQ ID NO: 307935 - DNA, 21 bp, Artificial sequence
  SiRNA target sequence
attttatcgaggaggtagacg

SEQ ID NO: 307936 - DNA, 21 bp, Artificial sequence
  SiRNA target sequence
ttttatcgaggaggtagacga

SEQ ID NO: 307937 - DNA, 21 bp, Artificial sequence
  SiRNA target sequence
tttatcgaggaggtagacgat

SEQ ID NO: 307938 - DNA, 21 bp, Artificial sequence
  SiRNA target sequence
ttatcgaggaggtagacgata

SEQ ID NO: 307939 - DNA, 21 bp, Artificial sequence
  SiRNA target sequence
tatcgaggaggtagacgatat

SEQ ID NO: 307940 - DNA, 21 bp, Artificial sequence
  SiRNA target sequence
atcgaggaggtagacgatata

SEQ ID NO: 307941 - DNA, 21 bp, Artificial sequence
  SiRNA target sequence
tcgaggaggtagacgatataa

SEQ ID NO: 307942 - DNA, 21 bp, Artificial sequence
  SiRNA target sequence
cgaggaggtagacgatataaa

SEQ ID NO: 307943 - DNA, 21 bp, Artificial sequence
  SiRNA target sequence
gaggaggtagacgatataaat

SEQ ID NO: 307944 - DNA, 21 bp, Artificial sequence
  SiRNA target sequence
aggaggtagacgatataaatt

SEQ ID NO: 307945 - DNA, 21 bp, Artificial sequence
  SiRNA target sequence
ggaggtagacgatataaattc

SEQ ID NO: 307946 - DNA, 21 bp, Artificial sequence
  SiRNA target sequence
gaggtagacgatataaattct

SEQ ID NO: 307947 - DNA, 21 bp, Artificial sequence
  SiRNA target sequence
aggtagacgatataaattctt

SEQ ID NO: 307948 - DNA, 21 bp, Artificial sequence
  SiRNA target sequence
ggtagacgatataaattcttt

SEQ ID NO: 307949 - DNA, 21 bp, Artificial sequence
  SiRNA target sequence
gtagacgatataaattcttta

SEQ ID NO: 307950 - DNA, 21 bp, Artificial sequence
  SiRNA target sequence
tagacgatataaattctttaa

SEQ ID NO: 307951 - DNA, 21 bp, Artificial sequence
  SiRNA target sequence
agacgatataaattctttaac

SEQ ID NO: 307952 - DNA, 21 bp, Artificial sequence
  SiRNA target sequence
gacgatataaattctttaaca

SEQ ID NO: 307953 - DNA, 21 bp, Artificial sequence
  SiRNA target sequence
acgatataaattctttaacac

SEQ ID NO: 307954 - DNA, 21 bp, Artificial sequence
  SiRNA target sequence
cgatataaattctttaacacg

SEQ ID NO: 307955 - DNA, 21 bp, Artificial sequence
  SiRNA target sequence
gatataaattctttaacacga

SEQ ID NO: 307956 - DNA, 21 bp, Artificial sequence
  SiRNA target sequence
atataaattctttaacacgac

SEQ ID NO: 307957 - DNA, 21 bp, Artificial sequence
  SiRNA target sequence
tataaattctttaacacgacc

SEQ ID NO: 307958 - DNA, 21 bp, Artificial sequence
  SiRNA target sequence
ataaattctttaacacgaccc

SEQ ID NO: 307959 - DNA, 21 bp, Artificial sequence
  SiRNA target sequence
taaattctttaacacgacccc

SEQ ID NO: 307960 - DNA, 21 bp, Artificial sequence
  SiRNA target sequence
aaattctttaacacgaccccc

SEQ ID NO: 307961 - DNA, 21 bp, Artificial sequence
  SiRNA target sequence
aattctttaacacgacccccc

SEQ ID NO: 307962 - DNA, 21 bp, Artificial sequence
  SiRNA target sequence
attctttaacacgacccccct

SEQ ID NO: 307963 - DNA, 21 bp, Artificial sequence
  SiRNA target sequence
ttctttaacacgaccccccta

SEQ ID NO: 307964 - DNA, 21 bp, Artificial sequence
  SiRNA target sequence
tctttaacacgacccccctaa

SEQ ID NO: 307965 - DNA, 21 bp, Artificial sequence
  SiRNA target sequence
ctttaacacgacccccctaaa

SEQ ID NO: 307966 - DNA, 21 bp, Artificial sequence
  SiRNA target sequence
tttaacacgacccccctaaaa

SEQ ID NO: 307967 - DNA, 21 bp, Artificial sequence
  SiRNA target sequence
ttaacacgacccccctaaaac

SEQ ID NO: 307968 - DNA, 21 bp, Artificial sequence
  SiRNA target sequence
taacacgacccccctaaaaca

SEQ ID NO: 307969 - DNA, 21 bp, Artificial sequence
  SiRNA target sequence
aacacgacccccctaaaacaa

SEQ ID NO: 307970 - DNA, 21 bp, Artificial sequence
  SiRNA target sequence
acacgacccccctaaaacaat

SEQ ID NO: 307971 - DNA, 21 bp, Artificial sequence
  SiRNA target sequence
cacgacccccctaaaacaatc

SEQ ID NO: 307972 - DNA, 21 bp, Artificial sequence
  SiRNA target sequence
acgacccccctaaaacaatca

SEQ ID NO: 307973 - DNA, 21 bp, Artificial sequence
  SiRNA target sequence
cgacccccctaaaacaatcac

SEQ ID NO: 307974 - DNA, 21 bp, Artificial sequence
  SiRNA target sequence
gacccccctaaaacaatcaca

SEQ ID NO: 307975 - DNA, 21 bp, Artificial sequence
  SiRNA target sequence
acccccctaaaacaatcacaa

SEQ ID NO: 307976 - DNA, 21 bp, Artificial sequence
  SiRNA target sequence
cccccctaaaacaatcacaaa

SEQ ID NO: 307977 - DNA, 21 bp, Artificial sequence
  SiRNA target sequence
ccccctaaaacaatcacaaac

SEQ ID NO: 307978 - DNA, 21 bp, Artificial sequence
  SiRNA target sequence
cccctaaaacaatcacaaacc

SEQ ID NO: 307979 - DNA, 21 bp, Artificial sequence
  SiRNA target sequence
ccctaaaacaatcacaaacct

SEQ ID NO: 307980 - DNA, 21 bp, Artificial sequence
  SiRNA target sequence
cctaaaacaatcacaaacctg

SEQ ID NO: 307981 - DNA, 21 bp, Artificial sequence
  SiRNA target sequence
ctaaaacaatcacaaacctgt

SEQ ID NO: 307982 - DNA, 21 bp, Artificial sequence
  SiRNA target sequence
taaaacaatcacaaacctgtt

SEQ ID NO: 307983 - DNA, 21 bp, Artificial sequence
  SiRNA target sequence
aaaacaatcacaaacctgtta

SEQ ID NO: 307984 - DNA, 21 bp, Artificial sequence
  SiRNA target sequence
aaacaatcacaaacctgttat

SEQ ID NO: 307985 - DNA, 21 bp, Artificial sequence
  SiRNA target sequence
aacaatcacaaacctgttatg

SEQ ID NO: 307986 - DNA, 21 bp, Artificial sequence
  SiRNA target sequence
acaatcacaaacctgttatgt

SEQ ID NO: 307987 - DNA, 21 bp, Artificial sequence
  SiRNA target sequence
caatcacaaacctgttatgtg

SEQ ID NO: 307988 - DNA, 21 bp, Artificial sequence
  SiRNA target sequence
aatcacaaacctgttatgtga

SEQ ID NO: 307989 - DNA, 21 bp, Artificial sequence
  SiRNA target sequence
atcacaaacctgttatgtgag

SEQ ID NO: 307990 - DNA, 21 bp, Artificial sequence
  SiRNA target sequence
tcacaaacctgttatgtgagg

SEQ ID NO: 307991 - DNA, 21 bp, Artificial sequence
  SiRNA target sequence
cacaaacctgttatgtgagga

SEQ ID NO: 307992 - DNA, 21 bp, Artificial sequence
  SiRNA target sequence
acaaacctgttatgtgaggag

SEQ ID NO: 307993 - DNA, 21 bp, Artificial sequence
  SiRNA target sequence
caaacctgttatgtgaggagt

SEQ ID NO: 307994 - DNA, 21 bp, Artificial sequence
  SiRNA target sequence
aaacctgttatgtgaggagtt

SEQ ID NO: 307995 - DNA, 21 bp, Artificial sequence
  SiRNA target sequence
aacctgttatgtgaggagttt

SEQ ID NO: 307996 - DNA, 21 bp, Artificial sequence
  SiRNA target sequence
acctgttatgtgaggagtttt

SEQ ID NO: 307997 - DNA, 21 bp, Artificial sequence
  SiRNA target sequence
cctgttatgtgaggagttttc

SEQ ID NO: 307998 - DNA, 21 bp, Artificial sequence
  SiRNA target sequence
ctgttatgtgaggagttttct

SEQ ID NO: 307999 - DNA, 21 bp, Artificial sequence
  SiRNA target sequence
tgttatgtgaggagttttcta

SEQ ID NO: 308000 - DNA, 21 bp, Artificial sequence
  SiRNA target sequence
gttatgtgaggagttttctaa

SEQ ID NO: 308001 - DNA, 21 bp, Artificial sequence
  SiRNA target sequence
ttatgtgaggagttttctaat

SEQ ID NO: 308002 - DNA, 21 bp, Artificial sequence
  SiRNA target sequence
tatgtgaggagttttctaatt

SEQ ID NO: 308003 - DNA, 21 bp, Artificial sequence
  SiRNA target sequence
atgtgaggagttttctaattc

SEQ ID NO: 308004 - DNA, 21 bp, Artificial sequence
  SiRNA target sequence
tgtgaggagttttctaattcc

SEQ ID NO: 308005 - DNA, 21 bp, Artificial sequence
  SiRNA target sequence
gtgaggagttttctaattccc

SEQ ID NO: 308006 - DNA, 21 bp, Artificial sequence
  SiRNA target sequence
tgaggagttttctaattcccc

SEQ ID NO: 308007 - DNA, 21 bp, Artificial sequence
  SiRNA target sequence
gaggagttttctaattccccg

SEQ ID NO: 308008 - DNA, 21 bp, Artificial sequence
  SiRNA target sequence
aggagttttctaattccccgt

SEQ ID NO: 308009 - DNA, 21 bp, Artificial sequence
  SiRNA target sequence
ggagttttctaattccccgta

SEQ ID NO: 308010 - DNA, 21 bp, Artificial sequence
  SiRNA target sequence
gagttttctaattccccgtaa

SEQ ID NO: 308011 - DNA, 21 bp, Artificial sequence
  SiRNA target sequence
agttttctaattccccgtaac

SEQ ID NO: 308012 - DNA, 21 bp, Artificial sequence
  SiRNA target sequence
gttttctaattccccgtaact

SEQ ID NO: 308013 - DNA, 21 bp, Artificial sequence
  SiRNA target sequence
ttttctaattccccgtaacta

SEQ ID NO: 308014 - DNA, 21 bp, Artificial sequence
  SiRNA target sequence
tttctaattccccgtaactac

SEQ ID NO: 308015 - DNA, 21 bp, Artificial sequence
  SiRNA target sequence
ttctaattccccgtaactaca

SEQ ID NO: 308016 - DNA, 21 bp, Artificial sequence
  SiRNA target sequence
tctaattccccgtaactacac

SEQ ID NO: 308017 - DNA, 21 bp, Artificial sequence
  SiRNA target sequence
ctaattccccgtaactacaca

SEQ ID NO: 308018 - DNA, 21 bp, Artificial sequence
  SiRNA target sequence
taattccccgtaactacacag

SEQ ID NO: 308019 - DNA, 21 bp, Artificial sequence
  SiRNA target sequence
aattccccgtaactacacagc

SEQ ID NO: 308020 - DNA, 21 bp, Artificial sequence
  SiRNA target sequence
attccccgtaactacacagcc

SEQ ID NO: 308021 - DNA, 21 bp, Artificial sequence
  SiRNA target sequence
ttccccgtaactacacagccg

SEQ ID NO: 308022 - DNA, 21 bp, Artificial sequence
  SiRNA target sequence
tccccgtaactacacagccga

SEQ ID NO: 308023 - DNA, 21 bp, Artificial sequence
  SiRNA target sequence
ccccgtaactacacagccgac

SEQ ID NO: 308024 - DNA, 21 bp, Artificial sequence
  SiRNA target sequence
cccgtaactacacagccgacg

SEQ ID NO: 308025 - DNA, 21 bp, Artificial sequence
  SiRNA target sequence
ccgtaactacacagccgacga

SEQ ID NO: 308026 - DNA, 21 bp, Artificial sequence
  SiRNA target sequence
cgtaactacacagccgacgaa

SEQ ID NO: 308027 - DNA, 21 bp, Artificial sequence
  SiRNA target sequence
gtaactacacagccgacgaaa

SEQ ID NO: 308028 - DNA, 21 bp, Artificial sequence
  SiRNA target sequence
taactacacagccgacgaaat

SEQ ID NO: 308029 - DNA, 21 bp, Artificial sequence
  SiRNA target sequence
aactacacagccgacgaaatt

SEQ ID NO: 308030 - DNA, 21 bp, Artificial sequence
  SiRNA target sequence
actacacagccgacgaaatta

SEQ ID NO: 308031 - DNA, 21 bp, Artificial sequence
  SiRNA target sequence
ctacacagccgacgaaattaa

SEQ ID NO: 308032 - DNA, 21 bp, Artificial sequence
  SiRNA target sequence
tacacagccgacgaaattaac

SEQ ID NO: 308033 - DNA, 21 bp, Artificial sequence
  SiRNA target sequence
acacagccgacgaaattaaca

SEQ ID NO: 308034 - DNA, 21 bp, Artificial sequence
  SiRNA target sequence
cacagccgacgaaattaacac

SEQ ID NO: 308035 - DNA, 21 bp, Artificial sequence
  SiRNA target sequence
acagccgacgaaattaacacc

SEQ ID NO: 308036 - DNA, 21 bp, Artificial sequence
  SiRNA target sequence
cagccgacgaaattaacaccg

SEQ ID NO: 308037 - DNA, 21 bp, Artificial sequence
  SiRNA target sequence
agccgacgaaattaacaccga

SEQ ID NO: 308038 - DNA, 21 bp, Artificial sequence
  SiRNA target sequence
gccgacgaaattaacaccgac

SEQ ID NO: 308039 - DNA, 21 bp, Artificial sequence
  SiRNA target sequence
ccgacgaaattaacaccgacg

SEQ ID NO: 308040 - DNA, 21 bp, Artificial sequence
  SiRNA target sequence
cgacgaaattaacaccgacgg

SEQ ID NO: 308041 - DNA, 21 bp, Artificial sequence
  SiRNA target sequence
gacgaaattaacaccgacgga

SEQ ID NO: 308042 - DNA, 21 bp, Artificial sequence
  SiRNA target sequence
acgaaattaacaccgacggac

SEQ ID NO: 308043 - DNA, 21 bp, Artificial sequence
  SiRNA target sequence
cgaaattaacaccgacggacc

SEQ ID NO: 308044 - DNA, 21 bp, Artificial sequence
  SiRNA target sequence
gaaattaacaccgacggacca

SEQ ID NO: 308045 - DNA, 21 bp, Artificial sequence
  SiRNA target sequence
aaattaacaccgacggaccat

SEQ ID NO: 308046 - DNA, 21 bp, Artificial sequence
  SiRNA target sequence
aattaacaccgacggaccatc

SEQ ID NO: 308047 - DNA, 21 bp, Artificial sequence
  SiRNA target sequence
attaacaccgacggaccatct

SEQ ID NO: 308048 - DNA, 21 bp, Artificial sequence
  SiRNA target sequence
ttaacaccgacggaccatctc

SEQ ID NO: 308049 - DNA, 21 bp, Artificial sequence
  SiRNA target sequence
taacaccgacggaccatctca

SEQ ID NO: 308050 - DNA, 21 bp, Artificial sequence
  SiRNA target sequence
aacaccgacggaccatctcat

SEQ ID NO: 308051 - DNA, 21 bp, Artificial sequence
  SiRNA target sequence
acaccgacggaccatctcata

SEQ ID NO: 308052 - DNA, 21 bp, Artificial sequence
  SiRNA target sequence
caccgacggaccatctcatat

SEQ ID NO: 308053 - DNA, 21 bp, Artificial sequence
  SiRNA target sequence
accgacggaccatctcatatt

SEQ ID NO: 308054 - DNA, 21 bp, Artificial sequence
  SiRNA target sequence
ccgacggaccatctcatatta

SEQ ID NO: 308055 - DNA, 21 bp, Artificial sequence
  SiRNA target sequence
cgacggaccatctcatattac

SEQ ID NO: 308056 - DNA, 21 bp, Artificial sequence
  SiRNA target sequence
gacggaccatctcatattaca

SEQ ID NO: 308057 - DNA, 21 bp, Artificial sequence
  SiRNA target sequence
acggaccatctcatattacat

SEQ ID NO: 308058 - DNA, 21 bp, Artificial sequence
  SiRNA target sequence
cggaccatctcatattacata

SEQ ID NO: 308059 - DNA, 21 bp, Artificial sequence
  SiRNA target sequence
ggaccatctcatattacatac

SEQ ID NO: 308060 - DNA, 21 bp, Artificial sequence
  SiRNA target sequence
gaccatctcatattacatacc

SEQ ID NO: 308061 - DNA, 21 bp, Artificial sequence
  SiRNA target sequence
accatctcatattacataccc

SEQ ID NO: 308062 - DNA, 21 bp, Artificial sequence
  SiRNA target sequence
ccatctcatattacataccca

SEQ ID NO: 308063 - DNA, 21 bp, Artificial sequence
  SiRNA target sequence
catctcatattacatacccag

SEQ ID NO: 308064 - DNA, 21 bp, Artificial sequence
  SiRNA target sequence
atctcatattacatacccagt

SEQ ID NO: 308065 - DNA, 21 bp, Artificial sequence
  SiRNA target sequence
tctcatattacatacccagta

SEQ ID NO: 308066 - DNA, 21 bp, Artificial sequence
  SiRNA target sequence
ctcatattacatacccagtaa

SEQ ID NO: 308067 - DNA, 21 bp, Artificial sequence
  SiRNA target sequence
tcatattacatacccagtaat

SEQ ID NO: 308068 - DNA, 21 bp, Artificial sequence
  SiRNA target sequence
catattacatacccagtaatt

SEQ ID NO: 308069 - DNA, 21 bp, Artificial sequence
  SiRNA target sequence
atattacatacccagtaatta

SEQ ID NO: 308070 - DNA, 21 bp, Artificial sequence
  SiRNA target sequence
tattacatacccagtaattaa

SEQ ID NO: 308071 - DNA, 21 bp, Artificial sequence
  SiRNA target sequence
attacatacccagtaattaac

SEQ ID NO: 308072 - DNA, 21 bp, Artificial sequence
  SiRNA target sequence
ttacatacccagtaattaacc

SEQ ID NO: 308073 - DNA, 21 bp, Artificial sequence
  SiRNA target sequence
tacatacccagtaattaaccc

SEQ ID NO: 308074 - DNA, 21 bp, Artificial sequence
  SiRNA target sequence
acatacccagtaattaaccca

SEQ ID NO: 308075 - DNA, 21 bp, Artificial sequence
  SiRNA target sequence
catacccagtaattaacccag

SEQ ID NO: 308076 - DNA, 21 bp, Artificial sequence
  SiRNA target sequence
atacccagtaattaacccagt

SEQ ID NO: 308077 - DNA, 21 bp, Artificial sequence
  SiRNA target sequence
tacccagtaattaacccagta

SEQ ID NO: 308078 - DNA, 21 bp, Artificial sequence
  SiRNA target sequence
acccagtaattaacccagtac

SEQ ID NO: 308079 - DNA, 21 bp, Artificial sequence
  SiRNA target sequence
cccagtaattaacccagtaca

SEQ ID NO: 308080 - DNA, 21 bp, Artificial sequence
  SiRNA target sequence
ccagtaattaacccagtacat

SEQ ID NO: 308081 - DNA, 21 bp, Artificial sequence
  SiRNA target sequence
cagtaattaacccagtacatg

SEQ ID NO: 308082 - DNA, 21 bp, Artificial sequence
  SiRNA target sequence
agtaattaacccagtacatga

SEQ ID NO: 308083 - DNA, 21 bp, Artificial sequence
  SiRNA target sequence
gtaattaacccagtacatgaa

SEQ ID NO: 308084 - DNA, 21 bp, Artificial sequence
  SiRNA target sequence
taattaacccagtacatgaag

SEQ ID NO: 308085 - DNA, 21 bp, Artificial sequence
  SiRNA target sequence
aattaacccagtacatgaagt

SEQ ID NO: 308086 - DNA, 21 bp, Artificial sequence
  SiRNA target sequence
attaacccagtacatgaagta

SEQ ID NO: 308087 - DNA, 21 bp, Artificial sequence
  SiRNA target sequence
ttaacccagtacatgaagtag

SEQ ID NO: 308088 - DNA, 21 bp, Artificial sequence
  SiRNA target sequence
taacccagtacatgaagtaga

SEQ ID NO: 308089 - DNA, 21 bp, Artificial sequence
  SiRNA target sequence
aacccagtacatgaagtagaa

SEQ ID NO: 308090 - DNA, 21 bp, Artificial sequence
  SiRNA target sequence
acccagtacatgaagtagaag

SEQ ID NO: 308091 - DNA, 21 bp, Artificial sequence
  SiRNA target sequence
cccagtacatgaagtagaagt

SEQ ID NO: 308092 - DNA, 21 bp, Artificial sequence
  SiRNA target sequence
ccagtacatgaagtagaagtt

SEQ ID NO: 308093 - DNA, 21 bp, Artificial sequence
  SiRNA target sequence
cagtacatgaagtagaagttc

SEQ ID NO: 308094 - DNA, 21 bp, Artificial sequence
  SiRNA target sequence
agtacatgaagtagaagttcc

SEQ ID NO: 308095 - DNA, 21 bp, Artificial sequence
  SiRNA target sequence
gtacatgaagtagaagttccc

SEQ ID NO: 308096 - DNA, 21 bp, Artificial sequence
  SiRNA target sequence
tacatgaagtagaagttccct

SEQ ID NO: 308097 - DNA, 21 bp, Artificial sequence
  SiRNA target sequence
acatgaagtagaagttccctt

SEQ ID NO: 308098 - DNA, 21 bp, Artificial sequence
  SiRNA target sequence
catgaagtagaagttcccttc

SEQ ID NO: 308099 - DNA, 21 bp, Artificial sequence
  SiRNA target sequence
atgaagtagaagttcccttct

SEQ ID NO: 308100 - DNA, 21 bp, Artificial sequence
  SiRNA target sequence
tgaagtagaagttcccttcta

SEQ ID NO: 308101 - DNA, 21 bp, Artificial sequence
  SiRNA target sequence
gaagtagaagttcccttctac

SEQ ID NO: 308102 - DNA, 21 bp, Artificial sequence
  SiRNA target sequence
aagtagaagttcccttctact

SEQ ID NO: 308103 - DNA, 21 bp, Artificial sequence
  SiRNA target sequence
agtagaagttcccttctactc

SEQ ID NO: 308104 - DNA, 21 bp, Artificial sequence
  SiRNA target sequence
gtagaagttcccttctactct

SEQ ID NO: 308105 - DNA, 21 bp, Artificial sequence
  SiRNA target sequence
tagaagttcccttctactctc

SEQ ID NO: 308106 - DNA, 21 bp, Artificial sequence
  SiRNA target sequence
agaagttcccttctactctca

SEQ ID NO: 308107 - DNA, 21 bp, Artificial sequence
  SiRNA target sequence
gaagttcccttctactctcag

SEQ ID NO: 308108 - DNA, 21 bp, Artificial sequence
  SiRNA target sequence
aagttcccttctactctcagt

SEQ ID NO: 308109 - DNA, 21 bp, Artificial sequence
  SiRNA target sequence
agttcccttctactctcagta

SEQ ID NO: 308110 - DNA, 21 bp, Artificial sequence
  SiRNA target sequence
gttcccttctactctcagtac

SEQ ID NO: 308111 - DNA, 21 bp, Artificial sequence
  SiRNA target sequence
ttcccttctactctcagtacc

SEQ ID NO: 308112 - DNA, 21 bp, Artificial sequence
  SiRNA target sequence
tcccttctactctcagtaccg

SEQ ID NO: 308113 - DNA, 21 bp, Artificial sequence
  SiRNA target sequence
cccttctactctcagtaccgc

SEQ ID NO: 308114 - DNA, 21 bp, Artificial sequence
  SiRNA target sequence
ccttctactctcagtaccgca

SEQ ID NO: 308115 - DNA, 21 bp, Artificial sequence
  SiRNA target sequence
cttctactctcagtaccgcaa

SEQ ID NO: 308116 - DNA, 21 bp, Artificial sequence
  SiRNA target sequence
ttctactctcagtaccgcaaa

SEQ ID NO: 308117 - DNA, 21 bp, Artificial sequence
  SiRNA target sequence
tctactctcagtaccgcaaaa

SEQ ID NO: 308118 - DNA, 21 bp, Artificial sequence
  SiRNA target sequence
ctactctcagtaccgcaaaat

SEQ ID NO: 308119 - DNA, 21 bp, Artificial sequence
  SiRNA target sequence
tactctcagtaccgcaaaatt

SEQ ID NO: 308120 - DNA, 21 bp, Artificial sequence
  SiRNA target sequence
actctcagtaccgcaaaattc

SEQ ID NO: 308121 - DNA, 21 bp, Artificial sequence
  SiRNA target sequence
ctctcagtaccgcaaaattcc

SEQ ID NO: 308122 - DNA, 21 bp, Artificial sequence
  SiRNA target sequence
tctcagtaccgcaaaattcct

SEQ ID NO: 308123 - DNA, 21 bp, Artificial sequence
  SiRNA target sequence
ctcagtaccgcaaaattccta

SEQ ID NO: 308124 - DNA, 21 bp, Artificial sequence
  SiRNA target sequence
tcagtaccgcaaaattcctat

SEQ ID NO: 308125 - DNA, 21 bp, Artificial sequence
  SiRNA target sequence
cagtaccgcaaaattcctatc

SEQ ID NO: 308126 - DNA, 21 bp, Artificial sequence
  SiRNA target sequence
agtaccgcaaaattcctatcg

SEQ ID NO: 308127 - DNA, 21 bp, Artificial sequence
  SiRNA target sequence
gtaccgcaaaattcctatcgc

SEQ ID NO: 308128 - DNA, 21 bp, Artificial sequence
  SiRNA target sequence
taccgcaaaattcctatcgct

SEQ ID NO: 308129 - DNA, 21 bp, Artificial sequence
  SiRNA target sequence
accgcaaaattcctatcgctt

SEQ ID NO: 308130 - DNA, 21 bp, Artificial sequence
  SiRNA target sequence
ccgcaaaattcctatcgcttc

SEQ ID NO: 308131 - DNA, 21 bp, Artificial sequence
  SiRNA target sequence
cgcaaaattcctatcgcttca

SEQ ID NO: 308132 - DNA, 21 bp, Artificial sequence
  SiRNA target sequence
gcaaaattcctatcgcttcaa

SEQ ID NO: 308133 - DNA, 21 bp, Artificial sequence
  SiRNA target sequence
caaaattcctatcgcttcaac

SEQ ID NO: 308134 - DNA, 21 bp, Artificial sequence
  SiRNA target sequence
aaaattcctatcgcttcaaca

SEQ ID NO: 308135 - DNA, 21 bp, Artificial sequence
  SiRNA target sequence
aaattcctatcgcttcaacat

SEQ ID NO: 308136 - DNA, 21 bp, Artificial sequence
  SiRNA target sequence
aattcctatcgcttcaacatc

SEQ ID NO: 308137 - DNA, 21 bp, Artificial sequence
  SiRNA target sequence
attcctatcgcttcaacatca

SEQ ID NO: 308138 - DNA, 21 bp, Artificial sequence
  SiRNA target sequence
ttcctatcgcttcaacatcag

SEQ ID NO: 308139 - DNA, 21 bp, Artificial sequence
  SiRNA target sequence
tcctatcgcttcaacatcaga

SEQ ID NO: 308140 - DNA, 21 bp, Artificial sequence
  SiRNA target sequence
cctatcgcttcaacatcagac

SEQ ID NO: 308141 - DNA, 21 bp, Artificial sequence
  SiRNA target sequence
ctatcgcttcaacatcagaca

SEQ ID NO: 308142 - DNA, 21 bp, Artificial sequence
  SiRNA target sequence
tatcgcttcaacatcagacaa

SEQ ID NO: 308143 - DNA, 21 bp, Artificial sequence
  SiRNA target sequence
atcgcttcaacatcagacaaa

SEQ ID NO: 308144 - DNA, 21 bp, Artificial sequence
  SiRNA target sequence
tcgcttcaacatcagacaaag

SEQ ID NO: 308145 - DNA, 21 bp, Artificial sequence
  SiRNA target sequence
cgcttcaacatcagacaaagg

SEQ ID NO: 308146 - DNA, 21 bp, Artificial sequence
  SiRNA target sequence
gcttcaacatcagacaaagga

SEQ ID NO: 308147 - DNA, 21 bp, Artificial sequence
  SiRNA target sequence
cttcaacatcagacaaaggat

SEQ ID NO: 308148 - DNA, 21 bp, Artificial sequence
  SiRNA target sequence
ttcaacatcagacaaaggata

SEQ ID NO: 308149 - DNA, 21 bp, Artificial sequence
  SiRNA target sequence
tcaacatcagacaaaggatac

SEQ ID NO: 308150 - DNA, 21 bp, Artificial sequence
  SiRNA target sequence
caacatcagacaaaggatacg

SEQ ID NO: 308151 - DNA, 21 bp, Artificial sequence
  SiRNA target sequence
aacatcagacaaaggatacga

SEQ ID NO: 308152 - DNA, 21 bp, Artificial sequence
  SiRNA target sequence
acatcagacaaaggatacgat

SEQ ID NO: 308153 - DNA, 21 bp, Artificial sequence
  SiRNA target sequence
catcagacaaaggatacgatt

SEQ ID NO: 308154 - DNA, 21 bp, Artificial sequence
  SiRNA target sequence
atcagacaaaggatacgattc

SEQ ID NO: 308155 - DNA, 21 bp, Artificial sequence
  SiRNA target sequence
tcagacaaaggatacgattca

SEQ ID NO: 308156 - DNA, 21 bp, Artificial sequence
  SiRNA target sequence
cagacaaaggatacgattcat

SEQ ID NO: 308157 - DNA, 21 bp, Artificial sequence
  SiRNA target sequence
agacaaaggatacgattcatc

SEQ ID NO: 308158 - DNA, 21 bp, Artificial sequence
  SiRNA target sequence
gacaaaggatacgattcatcc

SEQ ID NO: 308159 - DNA, 21 bp, Artificial sequence
  SiRNA target sequence
acaaaggatacgattcatccc

SEQ ID NO: 308160 - DNA, 21 bp, Artificial sequence
  SiRNA target sequence
caaaggatacgattcatccct

SEQ ID NO: 308161 - DNA, 21 bp, Artificial sequence
  SiRNA target sequence
aaaggatacgattcatccctc

SEQ ID NO: 308162 - DNA, 21 bp, Artificial sequence
  SiRNA target sequence
aaggatacgattcatccctca

SEQ ID NO: 308163 - DNA, 21 bp, Artificial sequence
  SiRNA target sequence
aggatacgattcatccctcat

SEQ ID NO: 308164 - DNA, 21 bp, Artificial sequence
  SiRNA target sequence
ggatacgattcatccctcatg

SEQ ID NO: 308165 - DNA, 21 bp, Artificial sequence
  SiRNA target sequence
gatacgattcatccctcatgt

SEQ ID NO: 308166 - DNA, 21 bp, Artificial sequence
  SiRNA target sequence
atacgattcatccctcatgta

SEQ ID NO: 308167 - DNA, 21 bp, Artificial sequence
  SiRNA target sequence
tacgattcatccctcatgtat

SEQ ID NO: 308168 - DNA, 21 bp, Artificial sequence
  SiRNA target sequence
acgattcatccctcatgtatt

SEQ ID NO: 308169 - DNA, 21 bp, Artificial sequence
  SiRNA target sequence
cgattcatccctcatgtatta

SEQ ID NO: 308170 - DNA, 21 bp, Artificial sequence
  SiRNA target sequence
gattcatccctcatgtattac

SEQ ID NO: 308171 - DNA, 21 bp, Artificial sequence
  SiRNA target sequence
attcatccctcatgtattaca

SEQ ID NO: 308172 - DNA, 21 bp, Artificial sequence
  SiRNA target sequence
ttcatccctcatgtattacac

SEQ ID NO: 308173 - DNA, 21 bp, Artificial sequence
  SiRNA target sequence
tcatccctcatgtattacaca

SEQ ID NO: 308174 - DNA, 21 bp, Artificial sequence
  SiRNA target sequence
catccctcatgtattacacaa

SEQ ID NO: 308175 - DNA, 21 bp, Artificial sequence
  SiRNA target sequence
atccctcatgtattacacaaa

SEQ ID NO: 308176 - DNA, 21 bp, Artificial sequence
  SiRNA target sequence
tccctcatgtattacacaaat

SEQ ID NO: 308177 - DNA, 21 bp, Artificial sequence
  SiRNA target sequence
ccctcatgtattacacaaatg

SEQ ID NO: 308178 - DNA, 21 bp, Artificial sequence
  SiRNA target sequence
cctcatgtattacacaaatgt

SEQ ID NO: 308179 - DNA, 21 bp, Artificial sequence
  SiRNA target sequence
ctcatgtattacacaaatgtt

SEQ ID NO: 308180 - DNA, 21 bp, Artificial sequence
  SiRNA target sequence
tcatgtattacacaaatgttg

SEQ ID NO: 308181 - DNA, 21 bp, Artificial sequence
  SiRNA target sequence
catgtattacacaaatgttgg

SEQ ID NO: 308182 - DNA, 21 bp, Artificial sequence
  SiRNA target sequence
atgtattacacaaatgttggt

SEQ ID NO: 308183 - DNA, 21 bp, Artificial sequence
  SiRNA target sequence
tgtattacacaaatgttggta

SEQ ID NO: 308184 - DNA, 21 bp, Artificial sequence
  SiRNA target sequence
gtattacacaaatgttggtac

SEQ ID NO: 308185 - DNA, 21 bp, Artificial sequence
  SiRNA target sequence
tattacacaaatgttggtacc

SEQ ID NO: 308186 - DNA, 21 bp, Artificial sequence
  SiRNA target sequence
attacacaaatgttggtaccc

SEQ ID NO: 308187 - DNA, 21 bp, Artificial sequence
  SiRNA target sequence
ttacacaaatgttggtaccca

SEQ ID NO: 308188 - DNA, 21 bp, Artificial sequence
  SiRNA target sequence
tacacaaatgttggtacccaa

SEQ ID NO: 308189 - DNA, 21 bp, Artificial sequence
  SiRNA target sequence
acacaaatgttggtacccaac

SEQ ID NO: 308190 - DNA, 21 bp, Artificial sequence
  SiRNA target sequence
cacaaatgttggtacccaaca

SEQ ID NO: 308191 - DNA, 21 bp, Artificial sequence
  SiRNA target sequence
acaaatgttggtacccaacag

SEQ ID NO: 308192 - DNA, 21 bp, Artificial sequence
  SiRNA target sequence
caaatgttggtacccaacaga

SEQ ID NO: 308193 - DNA, 21 bp, Artificial sequence
  SiRNA target sequence
aaatgttggtacccaacagat

SEQ ID NO: 308194 - DNA, 21 bp, Artificial sequence
  SiRNA target sequence
aatgttggtacccaacagatt

SEQ ID NO: 308195 - DNA, 21 bp, Artificial sequence
  SiRNA target sequence
atgttggtacccaacagattg

SEQ ID NO: 308196 - DNA, 21 bp, Artificial sequence
  SiRNA target sequence
tgttggtacccaacagattgt

SEQ ID NO: 308197 - DNA, 21 bp, Artificial sequence
  SiRNA target sequence
gttggtacccaacagattgta

SEQ ID NO: 308198 - DNA, 21 bp, Artificial sequence
  SiRNA target sequence
ttggtacccaacagattgtag

SEQ ID NO: 308199 - DNA, 21 bp, Artificial sequence
  SiRNA target sequence
tggtacccaacagattgtagc

SEQ ID NO: 308200 - DNA, 21 bp, Artificial sequence
  SiRNA target sequence
ggtacccaacagattgtagca

SEQ ID NO: 308201 - DNA, 21 bp, Artificial sequence
  SiRNA target sequence
gtacccaacagattgtagcac

SEQ ID NO: 308202 - DNA, 21 bp, Artificial sequence
  SiRNA target sequence
tacccaacagattgtagcacg

SEQ ID NO: 308203 - DNA, 21 bp, Artificial sequence
  SiRNA target sequence
acccaacagattgtagcacgt

SEQ ID NO: 308204 - DNA, 21 bp, Artificial sequence
  SiRNA target sequence
cccaacagattgtagcacgtg

SEQ ID NO: 308205 - DNA, 21 bp, Artificial sequence
  SiRNA target sequence
ccaacagattgtagcacgtgc

SEQ ID NO: 308206 - DNA, 21 bp, Artificial sequence
  SiRNA target sequence
caacagattgtagcacgtgcc

SEQ ID NO: 308207 - DNA, 21 bp, Artificial sequence
  SiRNA target sequence
aacagattgtagcacgtgccg

SEQ ID NO: 308208 - DNA, 21 bp, Artificial sequence
  SiRNA target sequence
acagattgtagcacgtgccgg

SEQ ID NO: 308209 - DNA, 21 bp, Artificial sequence
  SiRNA target sequence
cagattgtagcacgtgccggg

SEQ ID NO: 308210 - DNA, 21 bp, Artificial sequence
  SiRNA target sequence
agattgtagcacgtgccggga

SEQ ID NO: 308211 - DNA, 21 bp, Artificial sequence
  SiRNA target sequence
gattgtagcacgtgccgggaa

SEQ ID NO: 308212 - DNA, 21 bp, Artificial sequence
  SiRNA target sequence
attgtagcacgtgccgggaat

SEQ ID NO: 308213 - DNA, 21 bp, Artificial sequence
  SiRNA target sequence
ttgtagcacgtgccgggaatg

SEQ ID NO: 308214 - DNA, 21 bp, Artificial sequence
  SiRNA target sequence
tgtagcacgtgccgggaatga

SEQ ID NO: 308215 - DNA, 21 bp, Artificial sequence
  SiRNA target sequence
gtagcacgtgccgggaatgat

SEQ ID NO: 308216 - DNA, 21 bp, Artificial sequence
  SiRNA target sequence
tagcacgtgccgggaatgatg

SEQ ID NO: 308217 - DNA, 21 bp, Artificial sequence
  SiRNA target sequence
agcacgtgccgggaatgatga

SEQ ID NO: 308218 - DNA, 21 bp, Artificial sequence
  SiRNA target sequence
gcacgtgccgggaatgatgac

SEQ ID NO: 308219 - DNA, 21 bp, Artificial sequence
  SiRNA target sequence
cacgtgccgggaatgatgact

SEQ ID NO: 308220 - DNA, 21 bp, Artificial sequence
  SiRNA target sequence
acgtgccgggaatgatgactt

SEQ ID NO: 308221 - DNA, 21 bp, Artificial sequence
  SiRNA target sequence
cgtgccgggaatgatgacttc

SEQ ID NO: 308222 - DNA, 21 bp, Artificial sequence
  SiRNA target sequence
gtgccgggaatgatgacttca

SEQ ID NO: 308223 - DNA, 21 bp, Artificial sequence
  SiRNA target sequence
tgccgggaatgatgacttcac

SEQ ID NO: 308224 - DNA, 21 bp, Artificial sequence
  SiRNA target sequence
gccgggaatgatgacttcacc

SEQ ID NO: 308225 - DNA, 21 bp, Artificial sequence
  SiRNA target sequence
ccgggaatgatgacttcacct

SEQ ID NO: 308226 - DNA, 21 bp, Artificial sequence
  SiRNA target sequence
cgggaatgatgacttcacctt

SEQ ID NO: 308227 - DNA, 21 bp, Artificial sequence
  SiRNA target sequence
gggaatgatgacttcaccttt

SEQ ID NO: 308228 - DNA, 21 bp, Artificial sequence
  SiRNA target sequence
ggaatgatgacttcacctttg

SEQ ID NO: 308229 - DNA, 21 bp, Artificial sequence
  SiRNA target sequence
gaatgatgacttcacctttgg

SEQ ID NO: 308230 - DNA, 21 bp, Artificial sequence
  SiRNA target sequence
aatgatgacttcacctttggt

SEQ ID NO: 308231 - DNA, 21 bp, Artificial sequence
  SiRNA target sequence
atgatgacttcacctttggtt

SEQ ID NO: 308232 - DNA, 21 bp, Artificial sequence
  SiRNA target sequence
tgatgacttcacctttggttg

SEQ ID NO: 308233 - DNA, 21 bp, Artificial sequence
  SiRNA target sequence
gatgacttcacctttggttgg

SEQ ID NO: 308234 - DNA, 21 bp, Artificial sequence
  SiRNA target sequence
atgacttcacctttggttgga

SEQ ID NO: 308235 - DNA, 21 bp, Artificial sequence
  SiRNA target sequence
tgacttcacctttggttggat

SEQ ID NO: 308236 - DNA, 21 bp, Artificial sequence
  SiRNA target sequence
gacttcacctttggttggatg

SEQ ID NO: 308237 - DNA, 21 bp, Artificial sequence
  SiRNA target sequence
acttcacctttggttggatga

SEQ ID NO: 308238 - DNA, 21 bp, Artificial sequence
  SiRNA target sequence
cttcacctttggttggatgat

SEQ ID NO: 308239 - DNA, 21 bp, Artificial sequence
  SiRNA target sequence
ttcacctttggttggatgata

SEQ ID NO: 308240 - DNA, 21 bp, Artificial sequence
  SiRNA target sequence
tcacctttggttggatgatag

SEQ ID NO: 308241 - DNA, 21 bp, Artificial sequence
  SiRNA target sequence
cacctttggttggatgatagg

SEQ ID NO: 308242 - DNA, 21 bp, Artificial sequence
  SiRNA target sequence
acctttggttggatgataggc

SEQ ID NO: 308243 - DNA, 21 bp, Artificial sequence
  SiRNA target sequence
cctttggttggatgataggca

SEQ ID NO: 308244 - DNA, 21 bp, Artificial sequence
  SiRNA target sequence
ctttggttggatgataggcac

SEQ ID NO: 308245 - DNA, 21 bp, Artificial sequence
  SiRNA target sequence
tttggttggatgataggcact

SEQ ID NO: 308246 - DNA, 21 bp, Artificial sequence
  SiRNA target sequence
ttggttggatgataggcactc

SEQ ID NO: 308247 - DNA, 21 bp, Artificial sequence
  SiRNA target sequence
tggttggatgataggcactcc

SEQ ID NO: 308248 - DNA, 21 bp, Artificial sequence
  SiRNA target sequence
ggttggatgataggcactccg

SEQ ID NO: 308249 - DNA, 21 bp, Artificial sequence
  SiRNA target sequence
gttggatgataggcactccgc

SEQ ID NO: 308250 - DNA, 21 bp, Artificial sequence
  SiRNA target sequence
ttggatgataggcactccgca

SEQ ID NO: 308251 - DNA, 21 bp, Artificial sequence
  SiRNA target sequence
tggatgataggcactccgcaa

SEQ ID NO: 308252 - DNA, 21 bp, Artificial sequence
  SiRNA target sequence
ggatgataggcactccgcaac

SEQ ID NO: 308253 - DNA, 21 bp, Artificial sequence
  SiRNA target sequence
gatgataggcactccgcaact

SEQ ID NO: 308254 - DNA, 21 bp, Artificial sequence
  SiRNA target sequence
atgataggcactccgcaactt

SEQ ID NO: 308255 - DNA, 21 bp, Artificial sequence
  SiRNA target sequence
tgataggcactccgcaacttc

SEQ ID NO: 308256 - DNA, 21 bp, Artificial sequence
  SiRNA target sequence
gataggcactccgcaacttca

SEQ ID NO: 308257 - DNA, 21 bp, Artificial sequence
  SiRNA target sequence
ataggcactccgcaacttcaa

SEQ ID NO: 308258 - DNA, 21 bp, Artificial sequence
  SiRNA target sequence
taggcactccgcaacttcaag

SEQ ID NO: 308259 - DNA, 21 bp, Artificial sequence
  SiRNA target sequence
aggcactccgcaacttcaagg

SEQ ID NO: 308260 - DNA, 21 bp, Artificial sequence
  SiRNA target sequence
ggcactccgcaacttcaaggt

SEQ ID NO: 308261 - DNA, 21 bp, Artificial sequence
  SiRNA target sequence
gcactccgcaacttcaaggta

SEQ ID NO: 308262 - DNA, 21 bp, Artificial sequence
  SiRNA target sequence
cactccgcaacttcaaggtat

SEQ ID NO: 308263 - DNA, 21 bp, Artificial sequence
  SiRNA target sequence
actccgcaacttcaaggtata

SEQ ID NO: 308264 - DNA, 21 bp, Artificial sequence
  SiRNA target sequence
ctccgcaacttcaaggtataa

SEQ ID NO: 308265 - DNA, 21 bp, Artificial sequence
  SiRNA target sequence
tccgcaacttcaaggtataac

SEQ ID NO: 308266 - DNA, 21 bp, Artificial sequence
  SiRNA target sequence
ccgcaacttcaaggtataact

SEQ ID NO: 308267 - DNA, 21 bp, Artificial sequence
  SiRNA target sequence
cgcaacttcaaggtataacta

SEQ ID NO: 308268 - DNA, 21 bp, Artificial sequence
  SiRNA target sequence
gcaacttcaaggtataactaa

SEQ ID NO: 308269 - DNA, 21 bp, Artificial sequence
  SiRNA target sequence
caacttcaaggtataactaaa

SEQ ID NO: 308270 - DNA, 21 bp, Artificial sequence
  SiRNA target sequence
aacttcaaggtataactaaag

SEQ ID NO: 308271 - DNA, 21 bp, Artificial sequence
  SiRNA target sequence
acttcaaggtataactaaaga

SEQ ID NO: 308272 - DNA, 21 bp, Artificial sequence
  SiRNA target sequence
cttcaaggtataactaaagaa

SEQ ID NO: 308273 - DNA, 21 bp, Artificial sequence
  SiRNA target sequence
ttcaaggtataactaaagaag

SEQ ID NO: 308274 - DNA, 21 bp, Artificial sequence
  SiRNA target sequence
tcaaggtataactaaagaagt

SEQ ID NO: 308275 - DNA, 21 bp, Artificial sequence
  SiRNA target sequence
caaggtataactaaagaagtc

SEQ ID NO: 308276 - DNA, 21 bp, Artificial sequence
  SiRNA target sequence
aaggtataactaaagaagtcg

SEQ ID NO: 308277 - DNA, 21 bp, Artificial sequence
  SiRNA target sequence
aggtataactaaagaagtcgc

SEQ ID NO: 308278 - DNA, 21 bp, Artificial sequence
  SiRNA target sequence
ggtataactaaagaagtcgca

SEQ ID NO: 308279 - DNA, 21 bp, Artificial sequence
  SiRNA target sequence
gtataactaaagaagtcgcaa

SEQ ID NO: 308280 - DNA, 21 bp, Artificial sequence
  SiRNA target sequence
tataactaaagaagtcgcaaa

SEQ ID NO: 308281 - DNA, 21 bp, Artificial sequence
  SiRNA target sequence
ataactaaagaagtcgcaaac

SEQ ID NO: 308282 - DNA, 21 bp, Artificial sequence
  SiRNA target sequence
taactaaagaagtcgcaaact

SEQ ID NO: 308283 - DNA, 21 bp, Artificial sequence
  SiRNA target sequence
aactaaagaagtcgcaaacta

SEQ ID NO: 308284 - DNA, 21 bp, Artificial sequence
  SiRNA target sequence
actaaagaagtcgcaaactag

SEQ ID NO: 308285 - DNA, 21 bp, Artificial sequence
  SiRNA target sequence
ctaaagaagtcgcaaactaga

SEQ ID NO: 308286 - DNA, 21 bp, Artificial sequence
  SiRNA target sequence
taaagaagtcgcaaactagat

SEQ ID NO: 308287 - DNA, 21 bp, Artificial sequence
  SiRNA target sequence
aaagaagtcgcaaactagatg

SEQ ID NO: 308288 - DNA, 21 bp, Artificial sequence
  SiRNA target sequence
aagaagtcgcaaactagatgt

SEQ ID NO: 308289 - DNA, 21 bp, Artificial sequence
  SiRNA target sequence
agaagtcgcaaactagatgtg

SEQ ID NO: 308290 - DNA, 21 bp, Artificial sequence
  SiRNA target sequence
gaagtcgcaaactagatgtgc

SEQ ID NO: 308291 - DNA, 21 bp, Artificial sequence
  SiRNA target sequence
aagtcgcaaactagatgtgca

SEQ ID NO: 308292 - DNA, 21 bp, Artificial sequence
  SiRNA target sequence
agtcgcaaactagatgtgcat

SEQ ID NO: 308293 - DNA, 21 bp, Artificial sequence
  SiRNA target sequence
gtcgcaaactagatgtgcatt

SEQ ID NO: 308294 - DNA, 21 bp, Artificial sequence
  SiRNA target sequence
tcgcaaactagatgtgcatta

SEQ ID NO: 308295 - DNA, 21 bp, Artificial sequence
  SiRNA target sequence
cgcaaactagatgtgcattag

SEQ ID NO: 308296 - DNA, 21 bp, Artificial sequence
  SiRNA target sequence
gcaaactagatgtgcattagg

SEQ ID NO: 308297 - DNA, 21 bp, Artificial sequence
  SiRNA target sequence
caaactagatgtgcattagga

SEQ ID NO: 308298 - DNA, 21 bp, Artificial sequence
  SiRNA target sequence
aaactagatgtgcattaggag

SEQ ID NO: 308299 - DNA, 21 bp, Artificial sequence
  SiRNA target sequence
aactagatgtgcattaggaga

SEQ ID NO: 308300 - DNA, 21 bp, Artificial sequence
  SiRNA target sequence
actagatgtgcattaggagac

SEQ ID NO: 308301 - DNA, 21 bp, Artificial sequence
  SiRNA target sequence
ctagatgtgcattaggagaca

SEQ ID NO: 308302 - DNA, 21 bp, Artificial sequence
  SiRNA target sequence
tagatgtgcattaggagacag

SEQ ID NO: 308303 - DNA, 21 bp, Artificial sequence
  SiRNA target sequence
agatgtgcattaggagacagt

SEQ ID NO: 308304 - DNA, 21 bp, Artificial sequence
  SiRNA target sequence
gatgtgcattaggagacagta

SEQ ID NO: 308305 - DNA, 21 bp, Artificial sequence
  SiRNA target sequence
atgtgcattaggagacagtaa

SEQ ID NO: 308306 - DNA, 21 bp, Artificial sequence
  SiRNA target sequence
tgtgcattaggagacagtaaa

SEQ ID NO: 308307 - DNA, 21 bp, Artificial sequence
  SiRNA target sequence
gtgcattaggagacagtaaaa

SEQ ID NO: 308308 - DNA, 21 bp, Artificial sequence
  SiRNA target sequence
tgcattaggagacagtaaaat

SEQ ID NO: 308309 - DNA, 21 bp, Artificial sequence
  SiRNA target sequence
gcattaggagacagtaaaatc

SEQ ID NO: 308310 - DNA, 21 bp, Artificial sequence
  SiRNA target sequence
cattaggagacagtaaaatct

SEQ ID NO: 308311 - DNA, 21 bp, Artificial sequence
  SiRNA target sequence
attaggagacagtaaaatctc

SEQ ID NO: 308312 - DNA, 21 bp, Artificial sequence
  SiRNA target sequence
ttaggagacagtaaaatctcc

SEQ ID NO: 308313 - DNA, 21 bp, Artificial sequence
  SiRNA target sequence
taggagacagtaaaatctcct

SEQ ID NO: 308314 - DNA, 21 bp, Artificial sequence
  SiRNA target sequence
aggagacagtaaaatctcctt

SEQ ID NO: 308315 - DNA, 21 bp, Artificial sequence
  SiRNA target sequence
ggagacagtaaaatctccttt

SEQ ID NO: 308316 - DNA, 21 bp, Artificial sequence
  SiRNA target sequence
gagacagtaaaatctcctttt

SEQ ID NO: 308317 - DNA, 21 bp, Artificial sequence
  SiRNA target sequence
agacagtaaaatctccttttg

SEQ ID NO: 308318 - DNA, 21 bp, Artificial sequence
  SiRNA target sequence
gacagtaaaatctccttttgt

SEQ ID NO: 308319 - DNA, 21 bp, Artificial sequence
  SiRNA target sequence
acagtaaaatctccttttgta

SEQ ID NO: 308320 - DNA, 21 bp, Artificial sequence
  SiRNA target sequence
cagtaaaatctccttttgtat

SEQ ID NO: 308321 - DNA, 21 bp, Artificial sequence
  SiRNA target sequence
agtaaaatctccttttgtatg

SEQ ID NO: 308322 - DNA, 21 bp, Artificial sequence
  SiRNA target sequence
gtaaaatctccttttgtatgg

SEQ ID NO: 308323 - DNA, 21 bp, Artificial sequence
  SiRNA target sequence
taaaatctccttttgtatggc

SEQ ID NO: 308324 - DNA, 21 bp, Artificial sequence
  SiRNA target sequence
aaaatctccttttgtatggct

SEQ ID NO: 308325 - DNA, 21 bp, Artificial sequence
  SiRNA target sequence
aaatctccttttgtatggcta

SEQ ID NO: 308326 - DNA, 21 bp, Artificial sequence
  SiRNA target sequence
aatctccttttgtatggctat

SEQ ID NO: 308327 - DNA, 21 bp, Artificial sequence
  SiRNA target sequence
atctccttttgtatggctatt

SEQ ID NO: 308328 - DNA, 21 bp, Artificial sequence
  SiRNA target sequence
tctccttttgtatggctatta

SEQ ID NO: 308329 - DNA, 21 bp, Artificial sequence
  SiRNA target sequence
ctccttttgtatggctattag

SEQ ID NO: 308330 - DNA, 21 bp, Artificial sequence
  SiRNA target sequence
tccttttgtatggctattagt

SEQ ID NO: 308331 - DNA, 21 bp, Artificial sequence
  SiRNA target sequence
ccttttgtatggctattagtc

SEQ ID NO: 308332 - DNA, 21 bp, Artificial sequence
  SiRNA target sequence
cttttgtatggctattagtct

SEQ ID NO: 308333 - DNA, 21 bp, Artificial sequence
  SiRNA target sequence
ttttgtatggctattagtcta

SEQ ID NO: 308334 - DNA, 21 bp, Artificial sequence
  SiRNA target sequence
tttgtatggctattagtctaa

SEQ ID NO: 308335 - DNA, 21 bp, Artificial sequence
  SiRNA target sequence
ttgtatggctattagtctaaa

SEQ ID NO: 308336 - DNA, 21 bp, Artificial sequence
  SiRNA target sequence
tgtatggctattagtctaaat

SEQ ID NO: 308337 - DNA, 21 bp, Artificial sequence
  SiRNA target sequence
gtatggctattagtctaaatt

SEQ ID NO: 308338 - DNA, 21 bp, Artificial sequence
  SiRNA target sequence
tatggctattagtctaaattt

SEQ ID NO: 308339 - DNA, 21 bp, Artificial sequence
  SiRNA target sequence
atggctattagtctaaatttt

SEQ ID NO: 308340 - DNA, 21 bp, Artificial sequence
  SiRNA target sequence
tggctattagtctaaattttt

SEQ ID NO: 308341 - DNA, 21 bp, Artificial sequence
  SiRNA target sequence
ggctattagtctaaatttttc

SEQ ID NO: 308342 - DNA, 21 bp, Artificial sequence
  SiRNA target sequence
gctattagtctaaatttttca

SEQ ID NO: 308343 - DNA, 21 bp, Artificial sequence
  SiRNA target sequence
ctattagtctaaatttttcag

SEQ ID NO: 308344 - DNA, 21 bp, Artificial sequence
  SiRNA target sequence
tattagtctaaatttttcaga

SEQ ID NO: 308345 - DNA, 21 bp, Artificial sequence
  SiRNA target sequence
attagtctaaatttttcagaa

SEQ ID NO: 308346 - DNA, 21 bp, Artificial sequence
  SiRNA target sequence
ttagtctaaatttttcagaaa

SEQ ID NO: 308347 - DNA, 21 bp, Artificial sequence
  SiRNA target sequence
tagtctaaatttttcagaaaa

SEQ ID NO: 308348 - DNA, 21 bp, Artificial sequence
  SiRNA target sequence
agtctaaatttttcagaaaat

SEQ ID NO: 308349 - DNA, 21 bp, Artificial sequence
  SiRNA target sequence
gtctaaatttttcagaaaatt

SEQ ID NO: 308350 - DNA, 21 bp, Artificial sequence
  SiRNA target sequence
tctaaatttttcagaaaattt

SEQ ID NO: 308351 - DNA, 21 bp, Artificial sequence
  SiRNA target sequence
ctaaatttttcagaaaatttc

SEQ ID NO: 308352 - DNA, 21 bp, Artificial sequence
  SiRNA target sequence
taaatttttcagaaaatttca

SEQ ID NO: 308353 - DNA, 21 bp, Artificial sequence
  SiRNA target sequence
aaatttttcagaaaatttcag

SEQ ID NO: 308354 - DNA, 21 bp, Artificial sequence
  SiRNA target sequence
aatttttcagaaaatttcagt

SEQ ID NO: 308355 - DNA, 21 bp, Artificial sequence
  SiRNA target sequence
atttttcagaaaatttcagtt

SEQ ID NO: 308356 - DNA, 21 bp, Artificial sequence
  SiRNA target sequence
tttttcagaaaatttcagttt

SEQ ID NO: 308357 - DNA, 21 bp, Artificial sequence
  SiRNA target sequence
ttttcagaaaatttcagttta

SEQ ID NO: 308358 - DNA, 21 bp, Artificial sequence
  SiRNA target sequence
tttcagaaaatttcagtttag

SEQ ID NO: 308359 - DNA, 21 bp, Artificial sequence
  SiRNA target sequence
ttcagaaaatttcagtttaga

SEQ ID NO: 308360 - DNA, 21 bp, Artificial sequence
  SiRNA target sequence
tcagaaaatttcagtttagac

SEQ ID NO: 308361 - DNA, 21 bp, Artificial sequence
  SiRNA target sequence
cagaaaatttcagtttagacc

SEQ ID NO: 308362 - DNA, 21 bp, Artificial sequence
  SiRNA target sequence
agaaaatttcagtttagaccg

SEQ ID NO: 308363 - DNA, 21 bp, Artificial sequence
  SiRNA target sequence
gaaaatttcagtttagaccga

SEQ ID NO: 308364 - DNA, 21 bp, Artificial sequence
  SiRNA target sequence
aaaatttcagtttagaccgaa

SEQ ID NO: 308365 - DNA, 21 bp, Artificial sequence
  SiRNA target sequence
aaatttcagtttagaccgaaa

SEQ ID NO: 308366 - DNA, 21 bp, Artificial sequence
  SiRNA target sequence
aatttcagtttagaccgaaac

SEQ ID NO: 308367 - DNA, 21 bp, Artificial sequence
  SiRNA target sequence
atttcagtttagaccgaaaca

SEQ ID NO: 308368 - DNA, 21 bp, Artificial sequence
  SiRNA target sequence
tttcagtttagaccgaaacag

SEQ ID NO: 308369 - DNA, 21 bp, Artificial sequence
  SiRNA target sequence
ttcagtttagaccgaaacaga

SEQ ID NO: 308370 - DNA, 21 bp, Artificial sequence
  SiRNA target sequence
tcagtttagaccgaaacagag

SEQ ID NO: 308371 - DNA, 21 bp, Artificial sequence
  SiRNA target sequence
cagtttagaccgaaacagagt

SEQ ID NO: 308372 - DNA, 21 bp, Artificial sequence
  SiRNA target sequence
agtttagaccgaaacagagta

SEQ ID NO: 308373 - DNA, 21 bp, Artificial sequence
  SiRNA target sequence
gtttagaccgaaacagagtag

SEQ ID NO: 308374 - DNA, 21 bp, Artificial sequence
  SiRNA target sequence
tttagaccgaaacagagtagt

SEQ ID NO: 308375 - DNA, 21 bp, Artificial sequence
  SiRNA target sequence
ttagaccgaaacagagtagta

SEQ ID NO: 308376 - DNA, 21 bp, Artificial sequence
  SiRNA target sequence
tagaccgaaacagagtagtac

SEQ ID NO: 308377 - DNA, 21 bp, Artificial sequence
  SiRNA target sequence
agaccgaaacagagtagtacg

SEQ ID NO: 308378 - DNA, 21 bp, Artificial sequence
  SiRNA target sequence
gaccgaaacagagtagtacga

SEQ ID NO: 308379 - DNA, 21 bp, Artificial sequence
  SiRNA target sequence
accgaaacagagtagtacgag

SEQ ID NO: 308380 - DNA, 21 bp, Artificial sequence
  SiRNA target sequence
ccgaaacagagtagtacgagc

SEQ ID NO: 308381 - DNA, 21 bp, Artificial sequence
  SiRNA target sequence
cgaaacagagtagtacgagca

SEQ ID NO: 308382 - DNA, 21 bp, Artificial sequence
  SiRNA target sequence
gaaacagagtagtacgagcac

SEQ ID NO: 308383 - DNA, 21 bp, Artificial sequence
  SiRNA target sequence
aaacagagtagtacgagcact

SEQ ID NO: 308384 - DNA, 21 bp, Artificial sequence
  SiRNA target sequence
aacagagtagtacgagcacta

SEQ ID NO: 308385 - DNA, 21 bp, Artificial sequence
  SiRNA target sequence
acagagtagtacgagcactat

SEQ ID NO: 308386 - DNA, 21 bp, Artificial sequence
  SiRNA target sequence
cagagtagtacgagcactatg

SEQ ID NO: 308387 - DNA, 21 bp, Artificial sequence
  SiRNA target sequence
agagtagtacgagcactatgg

SEQ ID NO: 308388 - DNA, 21 bp, Artificial sequence
  SiRNA target sequence
gagtagtacgagcactatggt

SEQ ID NO: 308389 - DNA, 21 bp, Artificial sequence
  SiRNA target sequence
agtagtacgagcactatggtt

SEQ ID NO: 308390 - DNA, 21 bp, Artificial sequence
  SiRNA target sequence
gtagtacgagcactatggttc

SEQ ID NO: 308391 - DNA, 21 bp, Artificial sequence
  SiRNA target sequence
tagtacgagcactatggttcg

SEQ ID NO: 308392 - DNA, 21 bp, Artificial sequence
  SiRNA target sequence
agtacgagcactatggttcga

SEQ ID NO: 308393 - DNA, 21 bp, Artificial sequence
  SiRNA target sequence
gtacgagcactatggttcgaa

SEQ ID NO: 308394 - DNA, 21 bp, Artificial sequence
  SiRNA target sequence
tacgagcactatggttcgaaa

SEQ ID NO: 308395 - DNA, 21 bp, Artificial sequence
  SiRNA target sequence
acgagcactatggttcgaaaa

SEQ ID NO: 308396 - DNA, 21 bp, Artificial sequence
  SiRNA target sequence
cgagcactatggttcgaaaag

SEQ ID NO: 308397 - DNA, 21 bp, Artificial sequence
  SiRNA target sequence
gagcactatggttcgaaaaga

SEQ ID NO: 308398 - DNA, 21 bp, Artificial sequence
  SiRNA target sequence
agcactatggttcgaaaagac

SEQ ID NO: 308399 - DNA, 21 bp, Artificial sequence
  SiRNA target sequence
gcactatggttcgaaaagacg

SEQ ID NO: 308400 - DNA, 21 bp, Artificial sequence
  SiRNA target sequence
cactatggttcgaaaagacgc

SEQ ID NO: 308401 - DNA, 21 bp, Artificial sequence
  SiRNA target sequence
actatggttcgaaaagacgct

SEQ ID NO: 308402 - DNA, 21 bp, Artificial sequence
  SiRNA target sequence
ctatggttcgaaaagacgctt

SEQ ID NO: 308403 - DNA, 21 bp, Artificial sequence
  SiRNA target sequence
tatggttcgaaaagacgctta

SEQ ID NO: 308404 - DNA, 21 bp, Artificial sequence
  SiRNA target sequence
atggttcgaaaagacgcttaa

SEQ ID NO: 308405 - DNA, 21 bp, Artificial sequence
  SiRNA target sequence
tggttcgaaaagacgcttaaa

SEQ ID NO: 308406 - DNA, 21 bp, Artificial sequence
  SiRNA target sequence
ggttcgaaaagacgcttaaaa

SEQ ID NO: 308407 - DNA, 21 bp, Artificial sequence
  SiRNA target sequence
gttcgaaaagacgcttaaaag

SEQ ID NO: 308408 - DNA, 21 bp, Artificial sequence
  SiRNA target sequence
ttcgaaaagacgcttaaaaga

SEQ ID NO: 308409 - DNA, 21 bp, Artificial sequence
  SiRNA target sequence
tcgaaaagacgcttaaaagaa

SEQ ID NO: 308410 - DNA, 21 bp, Artificial sequence
  SiRNA target sequence
cgaaaagacgcttaaaagaaa

SEQ ID NO: 308411 - DNA, 21 bp, Artificial sequence
  SiRNA target sequence
gaaaagacgcttaaaagaaat

SEQ ID NO: 308412 - DNA, 21 bp, Artificial sequence
  SiRNA target sequence
aaaagacgcttaaaagaaatc

SEQ ID NO: 308413 - DNA, 21 bp, Artificial sequence
  SiRNA target sequence
aaagacgcttaaaagaaatct

SEQ ID NO: 308414 - DNA, 21 bp, Artificial sequence
  SiRNA target sequence
aagacgcttaaaagaaatctc

SEQ ID NO: 308415 - DNA, 21 bp, Artificial sequence
  SiRNA target sequence
agacgcttaaaagaaatctca

SEQ ID NO: 308416 - DNA, 21 bp, Artificial sequence
  SiRNA target sequence
gacgcttaaaagaaatctcac

SEQ ID NO: 308417 - DNA, 21 bp, Artificial sequence
  SiRNA target sequence
acgcttaaaagaaatctcact

SEQ ID NO: 308418 - DNA, 21 bp, Artificial sequence
  SiRNA target sequence
cgcttaaaagaaatctcacta

SEQ ID NO: 308419 - DNA, 21 bp, Artificial sequence
  SiRNA target sequence
gcttaaaagaaatctcactag

SEQ ID NO: 308420 - DNA, 21 bp, Artificial sequence
  SiRNA target sequence
cttaaaagaaatctcactaga

SEQ ID NO: 308421 - DNA, 21 bp, Artificial sequence
  SiRNA target sequence
ttaaaagaaatctcactagaa

SEQ ID NO: 308422 - DNA, 21 bp, Artificial sequence
  SiRNA target sequence
taaaagaaatctcactagaag

SEQ ID NO: 308423 - DNA, 21 bp, Artificial sequence
  SiRNA target sequence
aaaagaaatctcactagaagg

SEQ ID NO: 308424 - DNA, 21 bp, Artificial sequence
  SiRNA target sequence
aaagaaatctcactagaagga

SEQ ID NO: 308425 - DNA, 21 bp, Artificial sequence
  SiRNA target sequence
aagaaatctcactagaaggag

SEQ ID NO: 308426 - DNA, 21 bp, Artificial sequence
  SiRNA target sequence
agaaatctcactagaaggagg

SEQ ID NO: 308427 - DNA, 21 bp, Artificial sequence
  SiRNA target sequence
gaaatctcactagaaggaggc

SEQ ID NO: 308428 - DNA, 21 bp, Artificial sequence
  SiRNA target sequence
aaatctcactagaaggaggct

SEQ ID NO: 308429 - DNA, 21 bp, Artificial sequence
  SiRNA target sequence
aatctcactagaaggaggctt

SEQ ID NO: 308430 - DNA, 21 bp, Artificial sequence
  SiRNA target sequence
atctcactagaaggaggcttt

SEQ ID NO: 308431 - DNA, 21 bp, Artificial sequence
  SiRNA target sequence
tctcactagaaggaggctttt

SEQ ID NO: 308432 - DNA, 21 bp, Artificial sequence
  SiRNA target sequence
ctcactagaaggaggctttta

SEQ ID NO: 308433 - DNA, 21 bp, Artificial sequence
  SiRNA target sequence
tcactagaaggaggcttttaa

SEQ ID NO: 308434 - DNA, 21 bp, Artificial sequence
  SiRNA target sequence
cactagaaggaggcttttaag

SEQ ID NO: 308435 - DNA, 21 bp, Artificial sequence
  SiRNA target sequence
actagaaggaggcttttaagc

SEQ ID NO: 308436 - DNA, 21 bp, Artificial sequence
  SiRNA target sequence
ctagaaggaggcttttaagct

SEQ ID NO: 308437 - DNA, 21 bp, Artificial sequence
  SiRNA target sequence
tagaaggaggcttttaagcta

SEQ ID NO: 308438 - DNA, 21 bp, Artificial sequence
  SiRNA target sequence
agaaggaggcttttaagctat

SEQ ID NO: 308439 - DNA, 21 bp, Artificial sequence
  SiRNA target sequence
gaaggaggcttttaagctatc

SEQ ID NO: 308440 - DNA, 21 bp, Artificial sequence
  SiRNA target sequence
aaggaggcttttaagctatca

SEQ ID NO: 308441 - DNA, 21 bp, Artificial sequence
  SiRNA target sequence
aggaggcttttaagctatcag

SEQ ID NO: 308442 - DNA, 21 bp, Artificial sequence
  SiRNA target sequence
ggaggcttttaagctatcagc

SEQ ID NO: 308443 - DNA, 21 bp, Artificial sequence
  SiRNA target sequence
gaggcttttaagctatcagct

SEQ ID NO: 308444 - DNA, 21 bp, Artificial sequence
  SiRNA target sequence
aggcttttaagctatcagctt

SEQ ID NO: 308445 - DNA, 21 bp, Artificial sequence
  SiRNA target sequence
ggcttttaagctatcagcttt

SEQ ID NO: 308446 - DNA, 21 bp, Artificial sequence
  SiRNA target sequence
gcttttaagctatcagctttt

SEQ ID NO: 308447 - DNA, 21 bp, Artificial sequence
  SiRNA target sequence
cttttaagctatcagcttttt

SEQ ID NO: 308448 - DNA, 21 bp, Artificial sequence
  SiRNA target sequence
ttttaagctatcagctttttg

SEQ ID NO: 308449 - DNA, 21 bp, Artificial sequence
  SiRNA target sequence
tttaagctatcagctttttga

SEQ ID NO: 308450 - DNA, 21 bp, Artificial sequence
  SiRNA target sequence
ttaagctatcagctttttgac

SEQ ID NO: 308451 - DNA, 21 bp, Artificial sequence
  SiRNA target sequence
taagctatcagctttttgaca

SEQ ID NO: 308452 - DNA, 21 bp, Artificial sequence
  SiRNA target sequence
aagctatcagctttttgacat

SEQ ID NO: 308453 - DNA, 21 bp, Artificial sequence
  SiRNA target sequence
agctatcagctttttgacata

SEQ ID NO: 308454 - DNA, 21 bp, Artificial sequence
  SiRNA target sequence
gctatcagctttttgacataa

SEQ ID NO: 308455 - DNA, 21 bp, Artificial sequence
  SiRNA target sequence
ctatcagctttttgacataat

SEQ ID NO: 308456 - DNA, 21 bp, Artificial sequence
  SiRNA target sequence
tatcagctttttgacataatc

SEQ ID NO: 308457 - DNA, 21 bp, Artificial sequence
  SiRNA target sequence
atcagctttttgacataatct

SEQ ID NO: 308458 - DNA, 21 bp, Artificial sequence
  SiRNA target sequence
tcagctttttgacataatcta

SEQ ID NO: 308459 - DNA, 21 bp, Artificial sequence
  SiRNA target sequence
cagctttttgacataatctaa

SEQ ID NO: 308460 - DNA, 21 bp, Artificial sequence
  SiRNA target sequence
agctttttgacataatctaac

SEQ ID NO: 308461 - DNA, 21 bp, Artificial sequence
  SiRNA target sequence
gctttttgacataatctaacg

SEQ ID NO: 308462 - DNA, 21 bp, Artificial sequence
  SiRNA target sequence
ctttttgacataatctaacga

SEQ ID NO: 308463 - DNA, 21 bp, Artificial sequence
  SiRNA target sequence
tttttgacataatctaacgac

SEQ ID NO: 308464 - DNA, 21 bp, Artificial sequence
  SiRNA target sequence
ttttgacataatctaacgact

SEQ ID NO: 308465 - DNA, 21 bp, Artificial sequence
  SiRNA target sequence
tttgacataatctaacgacta

SEQ ID NO: 308466 - DNA, 21 bp, Artificial sequence
  SiRNA target sequence
ttgacataatctaacgactac

SEQ ID NO: 308467 - DNA, 21 bp, Artificial sequence
  SiRNA target sequence
tgacataatctaacgactacg

SEQ ID NO: 308468 - DNA, 21 bp, Artificial sequence
  SiRNA target sequence
gacataatctaacgactacgg

SEQ ID NO: 308469 - DNA, 21 bp, Artificial sequence
  SiRNA target sequence
acataatctaacgactacggc

SEQ ID NO: 308470 - DNA, 21 bp, Artificial sequence
  SiRNA target sequence
cataatctaacgactacggca

SEQ ID NO: 308471 - DNA, 21 bp, Artificial sequence
  SiRNA target sequence
ataatctaacgactacggcaa

SEQ ID NO: 308472 - DNA, 21 bp, Artificial sequence
  SiRNA target sequence
taatctaacgactacggcaaa

SEQ ID NO: 308473 - DNA, 21 bp, Artificial sequence
  SiRNA target sequence
aatctaacgactacggcaaaa

SEQ ID NO: 308474 - DNA, 21 bp, Artificial sequence
  SiRNA target sequence
atctaacgactacggcaaaat

SEQ ID NO: 308475 - DNA, 21 bp, Artificial sequence
  SiRNA target sequence
tctaacgactacggcaaaatt

SEQ ID NO: 308476 - DNA, 21 bp, Artificial sequence
  SiRNA target sequence
ctaacgactacggcaaaattt

SEQ ID NO: 308477 - DNA, 21 bp, Artificial sequence
  SiRNA target sequence
taacgactacggcaaaatttc

SEQ ID NO: 308478 - DNA, 21 bp, Artificial sequence
  SiRNA target sequence
aacgactacggcaaaatttcg

SEQ ID NO: 308479 - DNA, 21 bp, Artificial sequence
  SiRNA target sequence
acgactacggcaaaatttcgg

SEQ ID NO: 308480 - DNA, 21 bp, Artificial sequence
  SiRNA target sequence
cgactacggcaaaatttcgga

SEQ ID NO: 308481 - DNA, 21 bp, Artificial sequence
  SiRNA target sequence
gactacggcaaaatttcggaa

SEQ ID NO: 308482 - DNA, 21 bp, Artificial sequence
  SiRNA target sequence
actacggcaaaatttcggaat

SEQ ID NO: 308483 - DNA, 21 bp, Artificial sequence
  SiRNA target sequence
ctacggcaaaatttcggaatt

SEQ ID NO: 308484 - DNA, 21 bp, Artificial sequence
  SiRNA target sequence
tacggcaaaatttcggaatta

SEQ ID NO: 308485 - DNA, 21 bp, Artificial sequence
  SiRNA target sequence
acggcaaaatttcggaattag

SEQ ID NO: 308486 - DNA, 21 bp, Artificial sequence
  SiRNA target sequence
cggcaaaatttcggaattagg

SEQ ID NO: 308487 - DNA, 21 bp, Artificial sequence
  SiRNA target sequence
ggcaaaatttcggaattagga

SEQ ID NO: 308488 - DNA, 21 bp, Artificial sequence
  SiRNA target sequence
gcaaaatttcggaattaggat

SEQ ID NO: 308489 - DNA, 21 bp, Artificial sequence
  SiRNA target sequence
caaaatttcggaattaggata

SEQ ID NO: 308490 - DNA, 21 bp, Artificial sequence
  SiRNA target sequence
aaaatttcggaattaggataa

SEQ ID NO: 308491 - DNA, 21 bp, Artificial sequence
  SiRNA target sequence
aaatttcggaattaggataat

SEQ ID NO: 308492 - DNA, 21 bp, Artificial sequence
  SiRNA target sequence
aatttcggaattaggataatt

SEQ ID NO: 308493 - DNA, 21 bp, Artificial sequence
  SiRNA target sequence
atttcggaattaggataattt

SEQ ID NO: 308494 - DNA, 21 bp, Artificial sequence
  SiRNA target sequence
tttcggaattaggataatttt

SEQ ID NO: 308495 - DNA, 21 bp, Artificial sequence
  SiRNA target sequence
ttcggaattaggataatttta

SEQ ID NO: 308496 - DNA, 21 bp, Artificial sequence
  SiRNA target sequence
tcggaattaggataattttaa

SEQ ID NO: 308497 - DNA, 21 bp, Artificial sequence
  SiRNA target sequence
cggaattaggataattttaaa

SEQ ID NO: 308498 - DNA, 21 bp, Artificial sequence
  SiRNA target sequence
ggaattaggataattttaaaa

SEQ ID NO: 308499 - DNA, 21 bp, Artificial sequence
  SiRNA target sequence
gaattaggataattttaaaaa

SEQ ID NO: 308500 - DNA, 21 bp, Artificial sequence
  SiRNA target sequence
tacttgaacaaagttaaaaaa

SEQ ID NO: 308501 - DNA, 21 bp, Artificial sequence
  SiRNA target sequence
acttgaacaaagttaaaaaaa

SEQ ID NO: 308502 - DNA, 21 bp, Artificial sequence
  SiRNA target sequence
cttgaacaaagttaaaaaaat

SEQ ID NO: 308503 - DNA, 21 bp, Artificial sequence
  SiRNA target sequence
ttgaacaaagttaaaaaaata

SEQ ID NO: 308504 - DNA, 21 bp, Artificial sequence
  SiRNA target sequence
tgaacaaagttaaaaaaatac

SEQ ID NO: 308505 - DNA, 21 bp, Artificial sequence
  SiRNA target sequence
gaacaaagttaaaaaaatact

SEQ ID NO: 308506 - DNA, 21 bp, Artificial sequence
  SiRNA target sequence
aacaaagttaaaaaaatactc

SEQ ID NO: 308507 - DNA, 21 bp, Artificial sequence
  SiRNA target sequence
acaaagttaaaaaaatactcg

SEQ ID NO: 308508 - DNA, 21 bp, Artificial sequence
  SiRNA target sequence
caaagttaaaaaaatactcga

SEQ ID NO: 308509 - DNA, 21 bp, Artificial sequence
  SiRNA target sequence
aaagttaaaaaaatactcgaa

SEQ ID NO: 308510 - DNA, 21 bp, Artificial sequence
  SiRNA target sequence
aagttaaaaaaatactcgaaa

SEQ ID NO: 308511 - DNA, 21 bp, Artificial sequence
  SiRNA target sequence
agttaaaaaaatactcgaaag

SEQ ID NO: 308512 - DNA, 21 bp, Artificial sequence
  SiRNA target sequence
gttaaaaaaatactcgaaagt

SEQ ID NO: 308513 - DNA, 21 bp, Artificial sequence
  SiRNA target sequence
ttaaaaaaatactcgaaagtg

SEQ ID NO: 308514 - DNA, 21 bp, Artificial sequence
  SiRNA target sequence
taaaaaaatactcgaaagtgt

SEQ ID NO: 308515 - DNA, 21 bp, Artificial sequence
  SiRNA target sequence
aaaaaaatactcgaaagtgtg

SEQ ID NO: 308516 - DNA, 21 bp, Artificial sequence
  SiRNA target sequence
aaaaaatactcgaaagtgtgt

SEQ ID NO: 308517 - DNA, 21 bp, Artificial sequence
  SiRNA target sequence
aaaaatactcgaaagtgtgtg

SEQ ID NO: 308518 - DNA, 21 bp, Artificial sequence
  SiRNA target sequence
aaaatactcgaaagtgtgtgt

SEQ ID NO: 308519 - DNA, 21 bp, Artificial sequence
  SiRNA target sequence
aaatactcgaaagtgtgtgtt

SEQ ID NO: 308520 - DNA, 21 bp, Artificial sequence
  SiRNA target sequence
aatactcgaaagtgtgtgttt

SEQ ID NO: 308521 - DNA, 21 bp, Artificial sequence
  SiRNA target sequence
atactcgaaagtgtgtgtttt

SEQ ID NO: 308522 - DNA, 21 bp, Artificial sequence
  SiRNA target sequence
tactcgaaagtgtgtgttttt

SEQ ID NO: 308523 - DNA, 21 bp, Artificial sequence
  SiRNA target sequence
actcgaaagtgtgtgttttta

SEQ ID NO: 308524 - DNA, 21 bp, Artificial sequence
  SiRNA target sequence
ctcgaaagtgtgtgtttttat

SEQ ID NO: 308525 - DNA, 21 bp, Artificial sequence
  SiRNA target sequence
tcgaaagtgtgtgtttttatt

SEQ ID NO: 308526 - DNA, 21 bp, Artificial sequence
  SiRNA target sequence
cgaaagtgtgtgtttttattg

SEQ ID NO: 308527 - DNA, 21 bp, Artificial sequence
  SiRNA target sequence
gaaagtgtgtgtttttattgt

SEQ ID NO: 308528 - DNA, 21 bp, Artificial sequence
  SiRNA target sequence
aaagtgtgtgtttttattgtt

SEQ ID NO: 308529 - DNA, 21 bp, Artificial sequence
  SiRNA target sequence
aagtgtgtgtttttattgttc

SEQ ID NO: 308530 - DNA, 21 bp, Artificial sequence
  SiRNA target sequence
agtgtgtgtttttattgttca

SEQ ID NO: 308531 - DNA, 21 bp, Artificial sequence
  SiRNA target sequence
gtgtgtgtttttattgttcaa

SEQ ID NO: 308532 - DNA, 21 bp, Artificial sequence
  SiRNA target sequence
tgtgtgtttttattgttcaaa

SEQ ID NO: 308533 - DNA, 21 bp, Artificial sequence
  SiRNA target sequence
gtgtgtttttattgttcaaaa

SEQ ID NO: 308534 - DNA, 21 bp, Artificial sequence
  SiRNA target sequence
tgtgtttttattgttcaaaaa

SEQ ID NO: 308535 - DNA, 21 bp, Artificial sequence
  SiRNA target sequence
gtgtttttattgttcaaaaat

SEQ ID NO: 308536 - DNA, 21 bp, Artificial sequence
  SiRNA target sequence
tgtttttattgttcaaaaata

SEQ ID NO: 308537 - DNA, 21 bp, Artificial sequence
  SiRNA target sequence
gtttttattgttcaaaaataa

SEQ ID NO: 308538 - DNA, 21 bp, Artificial sequence
  SiRNA target sequence
tttttattgttcaaaaataaa

SEQ ID NO: 308539 - DNA, 21 bp, Artificial sequence
  SiRNA target sequence
ttttattgttcaaaaataaaa

SEQ ID NO: 308540 - DNA, 21 bp, Artificial sequence
  SiRNA target sequence
tttattgttcaaaaataaaag

SEQ ID NO: 308541 - DNA, 21 bp, Artificial sequence
  SiRNA target sequence
ttattgttcaaaaataaaagt

SEQ ID NO: 308542 - DNA, 21 bp, Artificial sequence
  SiRNA target sequence
tattgttcaaaaataaaagtt

SEQ ID NO: 308543 - DNA, 21 bp, Artificial sequence
  SiRNA target sequence
attgttcaaaaataaaagttg

SEQ ID NO: 308544 - DNA, 21 bp, Artificial sequence
  SiRNA target sequence
ttgttcaaaaataaaagttga

SEQ ID NO: 308545 - DNA, 21 bp, Artificial sequence
  SiRNA target sequence
tgttcaaaaataaaagttgat

SEQ ID NO: 308546 - DNA, 21 bp, Artificial sequence
  SiRNA target sequence
gttcaaaaataaaagttgata

SEQ ID NO: 308547 - DNA, 21 bp, Artificial sequence
  SiRNA target sequence
ttcaaaaataaaagttgataa

SEQ ID NO: 308548 - DNA, 21 bp, Artificial sequence
  SiRNA target sequence
tcaaaaataaaagttgataaa

SEQ ID NO: 308549 - DNA, 21 bp, Artificial sequence
  SiRNA target sequence
caaaaataaaagttgataaaa

SEQ ID NO: 308550 - DNA, 21 bp, Artificial sequence
  SiRNA target sequence
aaaaataaaagttgataaaaa

SEQ ID NO: 308551 - DNA, 21 bp, Artificial sequence
  SiRNA target sequence
aaaataaaagttgataaaaaa

SEQ ID NO: 308552 - DNA, 21 bp, Artificial sequence
  SiRNA target sequence
aaataaaagttgataaaaaaa

SEQ ID NO: 308553 - DNA, 21 bp, Artificial sequence
  SiRNA target sequence
aataaaagttgataaaaaaat

SEQ ID NO: 308554 - DNA, 21 bp, Artificial sequence
  SiRNA target sequence
ataaaagttgataaaaaaatt

SEQ ID NO: 308555 - DNA, 21 bp, Artificial sequence
  SiRNA target sequence
taaaagttgataaaaaaattt

SEQ ID NO: 308556 - DNA, 21 bp, Artificial sequence
  SiRNA target sequence
aaaagttgataaaaaaatttt

SEQ ID NO: 308557 - DNA, 21 bp, Artificial sequence
  SiRNA target sequence
aaagttgataaaaaaatttta

SEQ ID NO: 308558 - DNA, 21 bp, Artificial sequence
  SiRNA target sequence
aagttgataaaaaaattttaa

SEQ ID NO: 308559 - DNA, 21 bp, Artificial sequence
  SiRNA target sequence
agttgataaaaaaattttaaa

SEQ ID NO: 308560 - DNA, 21 bp, Artificial sequence
  SiRNA target sequence
gttgataaaaaaattttaaaa

SEQ ID NO: 308561 - DNA, 21 bp, Artificial sequence
  SiRNA target sequence
ttgataaaaaaattttaaaac

SEQ ID NO: 308562 - DNA, 21 bp, Artificial sequence
  SiRNA target sequence
tgataaaaaaattttaaaacc

SEQ ID NO: 308563 - DNA, 21 bp, Artificial sequence
  SiRNA target sequence
gataaaaaaattttaaaacca

SEQ ID NO: 308564 - DNA, 21 bp, Artificial sequence
  SiRNA target sequence
ataaaaaaattttaaaaccag

SEQ ID NO: 308565 - DNA, 21 bp, Artificial sequence
  SiRNA target sequence
taaaaaaattttaaaaccaga

SEQ ID NO: 308566 - DNA, 21 bp, Artificial sequence
  SiRNA target sequence
aaaaaaattttaaaaccagat

SEQ ID NO: 308567 - DNA, 21 bp, Artificial sequence
  SiRNA target sequence
aaaaaattttaaaaccagatt

SEQ ID NO: 308568 - DNA, 21 bp, Artificial sequence
  SiRNA target sequence
aaaaattttaaaaccagattt

SEQ ID NO: 308569 - DNA, 21 bp, Artificial sequence
  SiRNA target sequence
aaaattttaaaaccagattta

SEQ ID NO: 308570 - DNA, 21 bp, Artificial sequence
  SiRNA target sequence
aaattttaaaaccagatttaa

SEQ ID NO: 308571 - DNA, 21 bp, Artificial sequence
  SiRNA target sequence
aattttaaaaccagatttaaa

SEQ ID NO: 308572 - DNA, 21 bp, Artificial sequence
  SiRNA target sequence
attttaaaaccagatttaaat

SEQ ID NO: 308573 - DNA, 21 bp, Artificial sequence
  SiRNA target sequence
ttttaaaaccagatttaaatt

SEQ ID NO: 308574 - DNA, 21 bp, Artificial sequence
  SiRNA target sequence
tttaaaaccagatttaaattc

SEQ ID NO: 308575 - DNA, 21 bp, Artificial sequence
  SiRNA target sequence
ttaaaaccagatttaaattct

SEQ ID NO: 308576 - DNA, 21 bp, Artificial sequence
  SiRNA target sequence
taaaaccagatttaaattctg

SEQ ID NO: 308577 - DNA, 21 bp, Artificial sequence
  SiRNA target sequence
aaaaccagatttaaattctgt

SEQ ID NO: 308578 - DNA, 21 bp, Artificial sequence
  SiRNA target sequence
aaaccagatttaaattctgtg

SEQ ID NO: 308579 - DNA, 21 bp, Artificial sequence
  SiRNA target sequence
aaccagatttaaattctgtgt

SEQ ID NO: 308580 - DNA, 21 bp, Artificial sequence
  SiRNA target sequence
accagatttaaattctgtgtg

SEQ ID NO: 308581 - DNA, 21 bp, Artificial sequence
  SiRNA target sequence
ccagatttaaattctgtgtgg

SEQ ID NO: 308582 - DNA, 21 bp, Artificial sequence
  SiRNA target sequence
cagatttaaattctgtgtgga

SEQ ID NO: 308583 - DNA, 21 bp, Artificial sequence
  SiRNA target sequence
agatttaaattctgtgtggaa

SEQ ID NO: 308584 - DNA, 21 bp, Artificial sequence
  SiRNA target sequence
gatttaaattctgtgtggaat

SEQ ID NO: 308585 - DNA, 21 bp, Artificial sequence
  SiRNA target sequence
atttaaattctgtgtggaatt

SEQ ID NO: 308586 - DNA, 21 bp, Artificial sequence
  SiRNA target sequence
tttaaattctgtgtggaatta

SEQ ID NO: 308587 - DNA, 21 bp, Artificial sequence
  SiRNA target sequence
ttaaattctgtgtggaattat

SEQ ID NO: 308588 - DNA, 21 bp, Artificial sequence
  SiRNA target sequence
taaattctgtgtggaattatt

SEQ ID NO: 308589 - DNA, 21 bp, Artificial sequence
  SiRNA target sequence
aaattctgtgtggaattattg

SEQ ID NO: 308590 - DNA, 21 bp, Artificial sequence
  SiRNA target sequence
aattctgtgtggaattattgt

SEQ ID NO: 308591 - DNA, 21 bp, Artificial sequence
  SiRNA target sequence
attctgtgtggaattattgta

SEQ ID NO: 308592 - DNA, 21 bp, Artificial sequence
  SiRNA target sequence
ttctgtgtggaattattgtaa

SEQ ID NO: 308593 - DNA, 21 bp, Artificial sequence
  SiRNA target sequence
tctgtgtggaattattgtaaa

SEQ ID NO: 308594 - DNA, 21 bp, Artificial sequence
  SiRNA target sequence
ctgtgtggaattattgtaaat

SEQ ID NO: 308595 - DNA, 21 bp, Artificial sequence
  SiRNA target sequence
tgtgtggaattattgtaaatc

SEQ ID NO: 308596 - DNA, 21 bp, Artificial sequence
  SiRNA target sequence
gtgtggaattattgtaaatct

SEQ ID NO: 308597 - DNA, 21 bp, Artificial sequence
  SiRNA target sequence
tgtggaattattgtaaatcta

SEQ ID NO: 308598 - DNA, 21 bp, Artificial sequence
  SiRNA target sequence
gtggaattattgtaaatctaa

SEQ ID NO: 308599 - DNA, 21 bp, Artificial sequence
  SiRNA target sequence
tggaattattgtaaatctaaa

SEQ ID NO: 308600 - DNA, 21 bp, Artificial sequence
  SiRNA target sequence
ggaattattgtaaatctaaaa

SEQ ID NO: 308601 - DNA, 21 bp, Artificial sequence
  SiRNA target sequence
gaattattgtaaatctaaaac

SEQ ID NO: 308602 - DNA, 21 bp, Artificial sequence
  SiRNA target sequence
aattattgtaaatctaaaact

SEQ ID NO: 308603 - DNA, 21 bp, Artificial sequence
  SiRNA target sequence
attattgtaaatctaaaacta

SEQ ID NO: 308604 - DNA, 21 bp, Artificial sequence
  SiRNA target sequence
ttattgtaaatctaaaactac

SEQ ID NO: 308605 - DNA, 21 bp, Artificial sequence
  SiRNA target sequence
tattgtaaatctaaaactact

SEQ ID NO: 308606 - DNA, 21 bp, Artificial sequence
  SiRNA target sequence
attgtaaatctaaaactactt

SEQ ID NO: 308607 - DNA, 21 bp, Artificial sequence
  SiRNA target sequence
ttgtaaatctaaaactacttg

SEQ ID NO: 308608 - DNA, 21 bp, Artificial sequence
  SiRNA target sequence
tgtaaatctaaaactacttgt

SEQ ID NO: 308609 - DNA, 21 bp, Artificial sequence
  SiRNA target sequence
gtaaatctaaaactacttgtg

SEQ ID NO: 308610 - DNA, 21 bp, Artificial sequence
  SiRNA target sequence
taaatctaaaactacttgtga

SEQ ID NO: 308611 - DNA, 21 bp, Artificial sequence
  SiRNA target sequence
aaatctaaaactacttgtgaa

SEQ ID NO: 308612 - DNA, 21 bp, Artificial sequence
  SiRNA target sequence
aatctaaaactacttgtgaag

SEQ ID NO: 308613 - DNA, 21 bp, Artificial sequence
  SiRNA target sequence
atctaaaactacttgtgaagg

SEQ ID NO: 308614 - DNA, 21 bp, Artificial sequence
  SiRNA target sequence
tctaaaactacttgtgaaggt

SEQ ID NO: 308615 - DNA, 21 bp, Artificial sequence
  SiRNA target sequence
ctaaaactacttgtgaaggtg

SEQ ID NO: 308616 - DNA, 21 bp, Artificial sequence
  SiRNA target sequence
taaaactacttgtgaaggtga

SEQ ID NO: 308617 - DNA, 21 bp, Artificial sequence
  SiRNA target sequence
aaaactacttgtgaaggtgaa

SEQ ID NO: 308618 - DNA, 21 bp, Artificial sequence
  SiRNA target sequence
aaactacttgtgaaggtgaaa

SEQ ID NO: 308619 - DNA, 21 bp, Artificial sequence
  SiRNA target sequence
aactacttgtgaaggtgaaaa

SEQ ID NO: 308620 - DNA, 21 bp, Artificial sequence
  SiRNA target sequence
actacttgtgaaggtgaaaat

SEQ ID NO: 308621 - DNA, 21 bp, Artificial sequence
  SiRNA target sequence
ctacttgtgaaggtgaaaata

SEQ ID NO: 308622 - DNA, 21 bp, Artificial sequence
  SiRNA target sequence
tacttgtgaaggtgaaaatac

SEQ ID NO: 308623 - DNA, 21 bp, Artificial sequence
  SiRNA target sequence
acttgtgaaggtgaaaataca

SEQ ID NO: 308624 - DNA, 21 bp, Artificial sequence
  SiRNA target sequence
cttgtgaaggtgaaaatacac

SEQ ID NO: 308625 - DNA, 21 bp, Artificial sequence
  SiRNA target sequence
ttgtgaaggtgaaaatacacc

SEQ ID NO: 308626 - DNA, 21 bp, Artificial sequence
  SiRNA target sequence
tgtgaaggtgaaaatacacca

SEQ ID NO: 308627 - DNA, 21 bp, Artificial sequence
  SiRNA target sequence
gtgaaggtgaaaatacaccag

SEQ ID NO: 308628 - DNA, 21 bp, Artificial sequence
  SiRNA target sequence
tgaaggtgaaaatacaccaga

SEQ ID NO: 308629 - DNA, 21 bp, Artificial sequence
  SiRNA target sequence
gaaggtgaaaatacaccagac

SEQ ID NO: 308630 - DNA, 21 bp, Artificial sequence
  SiRNA target sequence
aaggtgaaaatacaccagacg

SEQ ID NO: 308631 - DNA, 21 bp, Artificial sequence
  SiRNA target sequence
aggtgaaaatacaccagacgg

SEQ ID NO: 308632 - DNA, 21 bp, Artificial sequence
  SiRNA target sequence
ggtgaaaatacaccagacggt

SEQ ID NO: 308633 - DNA, 21 bp, Artificial sequence
  SiRNA target sequence
gtgaaaatacaccagacggtt

SEQ ID NO: 308634 - DNA, 21 bp, Artificial sequence
  SiRNA target sequence
tgaaaatacaccagacggtta

SEQ ID NO: 308635 - DNA, 21 bp, Artificial sequence
  SiRNA target sequence
gaaaatacaccagacggttat

SEQ ID NO: 308636 - DNA, 21 bp, Artificial sequence
  SiRNA target sequence
aaaatacaccagacggttata

SEQ ID NO: 308637 - DNA, 21 bp, Artificial sequence
  SiRNA target sequence
aaatacaccagacggttatac

SEQ ID NO: 308638 - DNA, 21 bp, Artificial sequence
  SiRNA target sequence
aatacaccagacggttatact

SEQ ID NO: 308639 - DNA, 21 bp, Artificial sequence
  SiRNA target sequence
atacaccagacggttatactg

SEQ ID NO: 308640 - DNA, 21 bp, Artificial sequence
  SiRNA target sequence
tacaccagacggttatactgg

SEQ ID NO: 308641 - DNA, 21 bp, Artificial sequence
  SiRNA target sequence
acaccagacggttatactggt

SEQ ID NO: 308642 - DNA, 21 bp, Artificial sequence
  SiRNA target sequence
caccagacggttatactggtt

SEQ ID NO: 308643 - DNA, 21 bp, Artificial sequence
  SiRNA target sequence
accagacggttatactggttg

SEQ ID NO: 308644 - DNA, 21 bp, Artificial sequence
  SiRNA target sequence
ccagacggttatactggttgt

SEQ ID NO: 308645 - DNA, 21 bp, Artificial sequence
  SiRNA target sequence
cagacggttatactggttgtg

SEQ ID NO: 308646 - DNA, 21 bp, Artificial sequence
  SiRNA target sequence
agacggttatactggttgtgg

SEQ ID NO: 308647 - DNA, 21 bp, Artificial sequence
  SiRNA target sequence
gacggttatactggttgtggt

SEQ ID NO: 308648 - DNA, 21 bp, Artificial sequence
  SiRNA target sequence
acggttatactggttgtggta

SEQ ID NO: 308649 - DNA, 21 bp, Artificial sequence
  SiRNA target sequence
cggttatactggttgtggtaa

SEQ ID NO: 308650 - DNA, 21 bp, Artificial sequence
  SiRNA target sequence
ggttatactggttgtggtaat

SEQ ID NO: 308651 - DNA, 21 bp, Artificial sequence
  SiRNA target sequence
gttatactggttgtggtaata

SEQ ID NO: 308652 - DNA, 21 bp, Artificial sequence
  SiRNA target sequence
ttatactggttgtggtaataa

SEQ ID NO: 308653 - DNA, 21 bp, Artificial sequence
  SiRNA target sequence
tatactggttgtggtaataaa

SEQ ID NO: 308654 - DNA, 21 bp, Artificial sequence
  SiRNA target sequence
atactggttgtggtaataaac

SEQ ID NO: 308655 - DNA, 21 bp, Artificial sequence
  SiRNA target sequence
tactggttgtggtaataaaca

SEQ ID NO: 308656 - DNA, 21 bp, Artificial sequence
  SiRNA target sequence
actggttgtggtaataaacaa

SEQ ID NO: 308657 - DNA, 21 bp, Artificial sequence
  SiRNA target sequence
ctggttgtggtaataaacaac

SEQ ID NO: 308658 - DNA, 21 bp, Artificial sequence
  SiRNA target sequence
tggttgtggtaataaacaacc

SEQ ID NO: 308659 - DNA, 21 bp, Artificial sequence
  SiRNA target sequence
ggttgtggtaataaacaacct

SEQ ID NO: 308660 - DNA, 21 bp, Artificial sequence
  SiRNA target sequence
gttgtggtaataaacaacctc

SEQ ID NO: 308661 - DNA, 21 bp, Artificial sequence
  SiRNA target sequence
ttgtggtaataaacaacctct

SEQ ID NO: 308662 - DNA, 21 bp, Artificial sequence
  SiRNA target sequence
tgtggtaataaacaacctctt

SEQ ID NO: 308663 - DNA, 21 bp, Artificial sequence
  SiRNA target sequence
gtggtaataaacaacctctta

SEQ ID NO: 308664 - DNA, 21 bp, Artificial sequence
  SiRNA target sequence
tggtaataaacaacctcttat

SEQ ID NO: 308665 - DNA, 21 bp, Artificial sequence
  SiRNA target sequence
ggtaataaacaacctcttatt

SEQ ID NO: 308666 - DNA, 21 bp, Artificial sequence
  SiRNA target sequence
gtaataaacaacctcttatta

SEQ ID NO: 308667 - DNA, 21 bp, Artificial sequence
  SiRNA target sequence
taataaacaacctcttattaa

SEQ ID NO: 308668 - DNA, 21 bp, Artificial sequence
  SiRNA target sequence
aataaacaacctcttattaaa

SEQ ID NO: 308669 - DNA, 21 bp, Artificial sequence
  SiRNA target sequence
ataaacaacctcttattaaaa

SEQ ID NO: 308670 - DNA, 21 bp, Artificial sequence
  SiRNA target sequence
taaacaacctcttattaaaaa

SEQ ID NO: 308671 - DNA, 21 bp, Artificial sequence
  SiRNA target sequence
aaacaacctcttattaaaaaa

SEQ ID NO: 308672 - DNA, 21 bp, Artificial sequence
  SiRNA target sequence
aacaacctcttattaaaaaag

SEQ ID NO: 308673 - DNA, 21 bp, Artificial sequence
  SiRNA target sequence
acaacctcttattaaaaaaga

SEQ ID NO: 308674 - DNA, 21 bp, Artificial sequence
  SiRNA target sequence
caacctcttattaaaaaagaa

SEQ ID NO: 308675 - DNA, 21 bp, Artificial sequence
  SiRNA target sequence
aacctcttattaaaaaagaag

SEQ ID NO: 308676 - DNA, 21 bp, Artificial sequence
  SiRNA target sequence
acctcttattaaaaaagaagg

SEQ ID NO: 308677 - DNA, 21 bp, Artificial sequence
  SiRNA target sequence
cctcttattaaaaaagaagga

SEQ ID NO: 308678 - DNA, 21 bp, Artificial sequence
  SiRNA target sequence
ctcttattaaaaaagaaggac

SEQ ID NO: 308679 - DNA, 21 bp, Artificial sequence
  SiRNA target sequence
tcttattaaaaaagaaggact

SEQ ID NO: 308680 - DNA, 21 bp, Artificial sequence
  SiRNA target sequence
cttattaaaaaagaaggactt

SEQ ID NO: 308681 - DNA, 21 bp, Artificial sequence
  SiRNA target sequence
ttattaaaaaagaaggacttg

SEQ ID NO: 308682 - DNA, 21 bp, Artificial sequence
  SiRNA target sequence
tattaaaaaagaaggacttgg

SEQ ID NO: 308683 - DNA, 21 bp, Artificial sequence
  SiRNA target sequence
attaaaaaagaaggacttgga

SEQ ID NO: 308684 - DNA, 21 bp, Artificial sequence
  SiRNA target sequence
ttaaaaaagaaggacttggac

SEQ ID NO: 308685 - DNA, 21 bp, Artificial sequence
  SiRNA target sequence
taaaaaagaaggacttggact

SEQ ID NO: 308686 - DNA, 21 bp, Artificial sequence
  SiRNA target sequence
aaaaaagaaggacttggactc

SEQ ID NO: 308687 - DNA, 21 bp, Artificial sequence
  SiRNA target sequence
aaaaagaaggacttggactcg

SEQ ID NO: 308688 - DNA, 21 bp, Artificial sequence
  SiRNA target sequence
aaaagaaggacttggactcgt

SEQ ID NO: 308689 - DNA, 21 bp, Artificial sequence
  SiRNA target sequence
aaagaaggacttggactcgtt

SEQ ID NO: 308690 - DNA, 21 bp, Artificial sequence
  SiRNA target sequence
aagaaggacttggactcgttg

SEQ ID NO: 308691 - DNA, 21 bp, Artificial sequence
  SiRNA target sequence
agaaggacttggactcgttgc

SEQ ID NO: 308692 - DNA, 21 bp, Artificial sequence
  SiRNA target sequence
gaaggacttggactcgttgct

SEQ ID NO: 308693 - DNA, 21 bp, Artificial sequence
  SiRNA target sequence
aaggacttggactcgttgctt

SEQ ID NO: 308694 - DNA, 21 bp, Artificial sequence
  SiRNA target sequence
aggacttggactcgttgcttt

SEQ ID NO: 308695 - DNA, 21 bp, Artificial sequence
  SiRNA target sequence
ggacttggactcgttgctttt

SEQ ID NO: 308696 - DNA, 21 bp, Artificial sequence
  SiRNA target sequence
gacttggactcgttgctttta

SEQ ID NO: 308697 - DNA, 21 bp, Artificial sequence
  SiRNA target sequence
acttggactcgttgcttttat

SEQ ID NO: 308698 - DNA, 21 bp, Artificial sequence
  SiRNA target sequence
cttggactcgttgcttttatg

SEQ ID NO: 308699 - DNA, 21 bp, Artificial sequence
  SiRNA target sequence
ttggactcgttgcttttatga

SEQ ID NO: 308700 - DNA, 21 bp, Artificial sequence
  SiRNA target sequence
tggactcgttgcttttatgaa

SEQ ID NO: 308701 - DNA, 21 bp, Artificial sequence
  SiRNA target sequence
ggactcgttgcttttatgaaa

SEQ ID NO: 308702 - DNA, 21 bp, Artificial sequence
  SiRNA target sequence
gactcgttgcttttatgaaag

SEQ ID NO: 308703 - DNA, 21 bp, Artificial sequence
  SiRNA target sequence
actcgttgcttttatgaaagg

SEQ ID NO: 308704 - DNA, 21 bp, Artificial sequence
  SiRNA target sequence
ctcgttgcttttatgaaaggg

SEQ ID NO: 308705 - DNA, 21 bp, Artificial sequence
  SiRNA target sequence
tcgttgcttttatgaaagggg

SEQ ID NO: 308706 - DNA, 21 bp, Artificial sequence
  SiRNA target sequence
cgttgcttttatgaaagggga

SEQ ID NO: 308707 - DNA, 21 bp, Artificial sequence
  SiRNA target sequence
gttgcttttatgaaaggggaa

SEQ ID NO: 308708 - DNA, 21 bp, Artificial sequence
  SiRNA target sequence
ttgcttttatgaaaggggaag

SEQ ID NO: 308709 - DNA, 21 bp, Artificial sequence
  SiRNA target sequence
tgcttttatgaaaggggaaga

SEQ ID NO: 308710 - DNA, 21 bp, Artificial sequence
  SiRNA target sequence
gcttttatgaaaggggaagaa

SEQ ID NO: 308711 - DNA, 21 bp, Artificial sequence
  SiRNA target sequence
cttttatgaaaggggaagaaa

SEQ ID NO: 308712 - DNA, 21 bp, Artificial sequence
  SiRNA target sequence
ttttatgaaaggggaagaaaa

SEQ ID NO: 308713 - DNA, 21 bp, Artificial sequence
  SiRNA target sequence
tttatgaaaggggaagaaaac

SEQ ID NO: 308714 - DNA, 21 bp, Artificial sequence
  SiRNA target sequence
ttatgaaaggggaagaaaact

SEQ ID NO: 308715 - DNA, 21 bp, Artificial sequence
  SiRNA target sequence
tatgaaaggggaagaaaactc

SEQ ID NO: 308716 - DNA, 21 bp, Artificial sequence
  SiRNA target sequence
atgaaaggggaagaaaactcc

SEQ ID NO: 308717 - DNA, 21 bp, Artificial sequence
  SiRNA target sequence
tgaaaggggaagaaaactccg

SEQ ID NO: 308718 - DNA, 21 bp, Artificial sequence
  SiRNA target sequence
gaaaggggaagaaaactccga

SEQ ID NO: 308719 - DNA, 21 bp, Artificial sequence
  SiRNA target sequence
aaaggggaagaaaactccgac

SEQ ID NO: 308720 - DNA, 21 bp, Artificial sequence
  SiRNA target sequence
aaggggaagaaaactccgacg

SEQ ID NO: 308721 - DNA, 21 bp, Artificial sequence
  SiRNA target sequence
aggggaagaaaactccgacgg

SEQ ID NO: 308722 - DNA, 21 bp, Artificial sequence
  SiRNA target sequence
ggggaagaaaactccgacggt

SEQ ID NO: 308723 - DNA, 21 bp, Artificial sequence
  SiRNA target sequence
gggaagaaaactccgacggta

SEQ ID NO: 308724 - DNA, 21 bp, Artificial sequence
  SiRNA target sequence
ggaagaaaactccgacggtaa

SEQ ID NO: 308725 - DNA, 21 bp, Artificial sequence
  SiRNA target sequence
gaagaaaactccgacggtaaa

SEQ ID NO: 308726 - DNA, 21 bp, Artificial sequence
  SiRNA target sequence
aagaaaactccgacggtaaag

SEQ ID NO: 308727 - DNA, 21 bp, Artificial sequence
  SiRNA target sequence
agaaaactccgacggtaaagt

SEQ ID NO: 308728 - DNA, 21 bp, Artificial sequence
  SiRNA target sequence
gaaaactccgacggtaaagtt

SEQ ID NO: 308729 - DNA, 21 bp, Artificial sequence
  SiRNA target sequence
aaaactccgacggtaaagtta

SEQ ID NO: 308730 - DNA, 21 bp, Artificial sequence
  SiRNA target sequence
aaactccgacggtaaagttat

SEQ ID NO: 308731 - DNA, 21 bp, Artificial sequence
  SiRNA target sequence
aactccgacggtaaagttatt

SEQ ID NO: 308732 - DNA, 21 bp, Artificial sequence
  SiRNA target sequence
actccgacggtaaagttattt

SEQ ID NO: 308733 - DNA, 21 bp, Artificial sequence
  SiRNA target sequence
ctccgacggtaaagttatttt

SEQ ID NO: 308734 - DNA, 21 bp, Artificial sequence
  SiRNA target sequence
tccgacggtaaagttatttta

SEQ ID NO: 308735 - DNA, 21 bp, Artificial sequence
  SiRNA target sequence
ccgacggtaaagttattttaa

SEQ ID NO: 308736 - DNA, 21 bp, Artificial sequence
  SiRNA target sequence
cgacggtaaagttattttaaa

SEQ ID NO: 308737 - DNA, 21 bp, Artificial sequence
  SiRNA target sequence
gacggtaaagttattttaaat

SEQ ID NO: 308738 - DNA, 21 bp, Artificial sequence
  SiRNA target sequence
acggtaaagttattttaaatg

SEQ ID NO: 308739 - DNA, 21 bp, Artificial sequence
  SiRNA target sequence
cggtaaagttattttaaatgg

SEQ ID NO: 308740 - DNA, 21 bp, Artificial sequence
  SiRNA target sequence
ggtaaagttattttaaatgga

SEQ ID NO: 308741 - DNA, 21 bp, Artificial sequence
  SiRNA target sequence
gtaaagttattttaaatggag

SEQ ID NO: 308742 - DNA, 21 bp, Artificial sequence
  SiRNA target sequence
taaagttattttaaatggaga

SEQ ID NO: 308743 - DNA, 21 bp, Artificial sequence
  SiRNA target sequence
aaagttattttaaatggagaa

SEQ ID NO: 308744 - DNA, 21 bp, Artificial sequence
  SiRNA target sequence
aagttattttaaatggagaaa

SEQ ID NO: 308745 - DNA, 21 bp, Artificial sequence
  SiRNA target sequence
agttattttaaatggagaaag

SEQ ID NO: 308746 - DNA, 21 bp, Artificial sequence
  SiRNA target sequence
gttattttaaatggagaaagg

SEQ ID NO: 308747 - DNA, 21 bp, Artificial sequence
  SiRNA target sequence
ttattttaaatggagaaaggg

SEQ ID NO: 308748 - DNA, 21 bp, Artificial sequence
  SiRNA target sequence
tattttaaatggagaaagggt

SEQ ID NO: 308749 - DNA, 21 bp, Artificial sequence
  SiRNA target sequence
attttaaatggagaaagggtt

SEQ ID NO: 308750 - DNA, 21 bp, Artificial sequence
  SiRNA target sequence
ttttaaatggagaaagggttt

SEQ ID NO: 308751 - DNA, 21 bp, Artificial sequence
  SiRNA target sequence
tttaaatggagaaagggtttt

SEQ ID NO: 308752 - DNA, 21 bp, Artificial sequence
  SiRNA target sequence
ttaaatggagaaagggttttg

SEQ ID NO: 308753 - DNA, 21 bp, Artificial sequence
  SiRNA target sequence
taaatggagaaagggttttga

SEQ ID NO: 308754 - DNA, 21 bp, Artificial sequence
  SiRNA target sequence
aaatggagaaagggttttgag

SEQ ID NO: 308755 - DNA, 21 bp, Artificial sequence
  SiRNA target sequence
aatggagaaagggttttgagt

SEQ ID NO: 308756 - DNA, 21 bp, Artificial sequence
  SiRNA target sequence
atggagaaagggttttgagta

SEQ ID NO: 308757 - DNA, 21 bp, Artificial sequence
  SiRNA target sequence
tggagaaagggttttgagtat

SEQ ID NO: 308758 - DNA, 21 bp, Artificial sequence
  SiRNA target sequence
ggagaaagggttttgagtatt

SEQ ID NO: 308759 - DNA, 21 bp, Artificial sequence
  SiRNA target sequence
gagaaagggttttgagtattt

SEQ ID NO: 308760 - DNA, 21 bp, Artificial sequence
  SiRNA target sequence
agaaagggttttgagtatttt

SEQ ID NO: 308761 - DNA, 21 bp, Artificial sequence
  SiRNA target sequence
gaaagggttttgagtattttg

SEQ ID NO: 308762 - DNA, 21 bp, Artificial sequence
  SiRNA target sequence
aaagggttttgagtattttga

SEQ ID NO: 308763 - DNA, 21 bp, Artificial sequence
  SiRNA target sequence
aagggttttgagtattttgaa

SEQ ID NO: 308764 - DNA, 21 bp, Artificial sequence
  SiRNA target sequence
agggttttgagtattttgaaa

SEQ ID NO: 308765 - DNA, 21 bp, Artificial sequence
  SiRNA target sequence
gggttttgagtattttgaaaa

SEQ ID NO: 308766 - DNA, 21 bp, Artificial sequence
  SiRNA target sequence
ggttttgagtattttgaaaaa

SEQ ID NO: 308767 - DNA, 21 bp, Artificial sequence
  SiRNA target sequence
gttttgagtattttgaaaaaa

SEQ ID NO: 308768 - DNA, 21 bp, Artificial sequence
  SiRNA target sequence
ttttgagtattttgaaaaaaa

SEQ ID NO: 308769 - DNA, 21 bp, Artificial sequence
  SiRNA target sequence
tttgagtattttgaaaaaaat

SEQ ID NO: 308770 - DNA, 21 bp, Artificial sequence
  SiRNA target sequence
ttgagtattttgaaaaaaatt

SEQ ID NO: 308771 - DNA, 21 bp, Artificial sequence
  SiRNA target sequence
tgagtattttgaaaaaaattt

SEQ ID NO: 308772 - DNA, 21 bp, Artificial sequence
  SiRNA target sequence
gagtattttgaaaaaaatttc

SEQ ID NO: 308773 - DNA, 21 bp, Artificial sequence
  SiRNA target sequence
agtattttgaaaaaaatttct

SEQ ID NO: 308774 - DNA, 21 bp, Artificial sequence
  SiRNA target sequence
gtattttgaaaaaaatttctg

SEQ ID NO: 308775 - DNA, 21 bp, Artificial sequence
  SiRNA target sequence
tattttgaaaaaaatttctga

SEQ ID NO: 308776 - DNA, 21 bp, Artificial sequence
  SiRNA target sequence
attttgaaaaaaatttctgaa

SEQ ID NO: 308777 - DNA, 21 bp, Artificial sequence
  SiRNA target sequence
ttttgaaaaaaatttctgaac

SEQ ID NO: 308778 - DNA, 21 bp, Artificial sequence
  SiRNA target sequence
tttgaaaaaaatttctgaaca

SEQ ID NO: 308779 - DNA, 21 bp, Artificial sequence
  SiRNA target sequence
ttgaaaaaaatttctgaacaa

SEQ ID NO: 308780 - DNA, 21 bp, Artificial sequence
  SiRNA target sequence
tgaaaaaaatttctgaacaag

SEQ ID NO: 308781 - DNA, 21 bp, Artificial sequence
  SiRNA target sequence
gaaaaaaatttctgaacaaga

SEQ ID NO: 308782 - DNA, 21 bp, Artificial sequence
  SiRNA target sequence
aaaaaaatttctgaacaagat

SEQ ID NO: 308783 - DNA, 21 bp, Artificial sequence
  SiRNA target sequence
aaaaaatttctgaacaagatg

SEQ ID NO: 308784 - DNA, 21 bp, Artificial sequence
  SiRNA target sequence
aaaaatttctgaacaagatgc

SEQ ID NO: 308785 - DNA, 21 bp, Artificial sequence
  SiRNA target sequence
aaaatttctgaacaagatgct

SEQ ID NO: 308786 - DNA, 21 bp, Artificial sequence
  SiRNA target sequence
aaatttctgaacaagatgcta

SEQ ID NO: 308787 - DNA, 21 bp, Artificial sequence
  SiRNA target sequence
aatttctgaacaagatgctaa

SEQ ID NO: 308788 - DNA, 21 bp, Artificial sequence
  SiRNA target sequence
atttctgaacaagatgctaat

SEQ ID NO: 308789 - DNA, 21 bp, Artificial sequence
  SiRNA target sequence
tttctgaacaagatgctaatt

SEQ ID NO: 308790 - DNA, 21 bp, Artificial sequence
  SiRNA target sequence
ttctgaacaagatgctaatta

SEQ ID NO: 308791 - DNA, 21 bp, Artificial sequence
  SiRNA target sequence
tctgaacaagatgctaattat

SEQ ID NO: 308792 - DNA, 21 bp, Artificial sequence
  SiRNA target sequence
ctgaacaagatgctaattata

SEQ ID NO: 308793 - DNA, 21 bp, Artificial sequence
  SiRNA target sequence
tgaacaagatgctaattatat

SEQ ID NO: 308794 - DNA, 21 bp, Artificial sequence
  SiRNA target sequence
gaacaagatgctaattatatg

SEQ ID NO: 308795 - DNA, 21 bp, Artificial sequence
  SiRNA target sequence
aacaagatgctaattatatgg

SEQ ID NO: 308796 - DNA, 21 bp, Artificial sequence
  SiRNA target sequence
acaagatgctaattatatggg

SEQ ID NO: 308797 - DNA, 21 bp, Artificial sequence
  SiRNA target sequence
caagatgctaattatatggga

SEQ ID NO: 308798 - DNA, 21 bp, Artificial sequence
  SiRNA target sequence
aagatgctaattatatgggat

SEQ ID NO: 308799 - DNA, 21 bp, Artificial sequence
  SiRNA target sequence
agatgctaattatatgggatt

SEQ ID NO: 308800 - DNA, 21 bp, Artificial sequence
  SiRNA target sequence
gatgctaattatatgggattt

SEQ ID NO: 308801 - DNA, 21 bp, Artificial sequence
  SiRNA target sequence
atgctaattatatgggatttg

SEQ ID NO: 308802 - DNA, 21 bp, Artificial sequence
  SiRNA target sequence
tgctaattatatgggatttga

SEQ ID NO: 308803 - DNA, 21 bp, Artificial sequence
  SiRNA target sequence
gctaattatatgggatttgat

SEQ ID NO: 308804 - DNA, 21 bp, Artificial sequence
  SiRNA target sequence
ctaattatatgggatttgatt

SEQ ID NO: 308805 - DNA, 21 bp, Artificial sequence
  SiRNA target sequence
taattatatgggatttgattt

SEQ ID NO: 308806 - DNA, 21 bp, Artificial sequence
  SiRNA target sequence
aattatatgggatttgatttt

SEQ ID NO: 308807 - DNA, 21 bp, Artificial sequence
  SiRNA target sequence
attatatgggatttgattttg

SEQ ID NO: 308808 - DNA, 21 bp, Artificial sequence
  SiRNA target sequence
ttatatgggatttgattttgt

SEQ ID NO: 308809 - DNA, 21 bp, Artificial sequence
  SiRNA target sequence
tatatgggatttgattttgtt

SEQ ID NO: 308810 - DNA, 21 bp, Artificial sequence
  SiRNA target sequence
atatgggatttgattttgtta

SEQ ID NO: 308811 - DNA, 21 bp, Artificial sequence
  SiRNA target sequence
tatgggatttgattttgttaa

SEQ ID NO: 308812 - DNA, 21 bp, Artificial sequence
  SiRNA target sequence
atgggatttgattttgttaat

SEQ ID NO: 308813 - DNA, 21 bp, Artificial sequence
  SiRNA target sequence
tgggatttgattttgttaata

SEQ ID NO: 308814 - DNA, 21 bp, Artificial sequence
  SiRNA target sequence
gggatttgattttgttaatag

SEQ ID NO: 308815 - DNA, 21 bp, Artificial sequence
  SiRNA target sequence
ggatttgattttgttaatagt

SEQ ID NO: 308816 - DNA, 21 bp, Artificial sequence
  SiRNA target sequence
gatttgattttgttaatagta

SEQ ID NO: 308817 - DNA, 21 bp, Artificial sequence
  SiRNA target sequence
atttgattttgttaatagtaa

SEQ ID NO: 308818 - DNA, 21 bp, Artificial sequence
  SiRNA target sequence
tttgattttgttaatagtaaa

SEQ ID NO: 308819 - DNA, 21 bp, Artificial sequence
  SiRNA target sequence
ttgattttgttaatagtaaac

SEQ ID NO: 308820 - DNA, 21 bp, Artificial sequence
  SiRNA target sequence
tgattttgttaatagtaaacc

SEQ ID NO: 308821 - DNA, 21 bp, Artificial sequence
  SiRNA target sequence
gattttgttaatagtaaaccc

SEQ ID NO: 308822 - DNA, 21 bp, Artificial sequence
  SiRNA target sequence
attttgttaatagtaaacccg

SEQ ID NO: 308823 - DNA, 21 bp, Artificial sequence
  SiRNA target sequence
ttttgttaatagtaaacccga

SEQ ID NO: 308824 - DNA, 21 bp, Artificial sequence
  SiRNA target sequence
tttgttaatagtaaacccgaa

SEQ ID NO: 308825 - DNA, 21 bp, Artificial sequence
  SiRNA target sequence
ttgttaatagtaaacccgaat

SEQ ID NO: 308826 - DNA, 21 bp, Artificial sequence
  SiRNA target sequence
tgttaatagtaaacccgaatg

SEQ ID NO: 308827 - DNA, 21 bp, Artificial sequence
  SiRNA target sequence
gttaatagtaaacccgaatgg

SEQ ID NO: 308828 - DNA, 21 bp, Artificial sequence
  SiRNA target sequence
ttaatagtaaacccgaatggt

SEQ ID NO: 308829 - DNA, 21 bp, Artificial sequence
  SiRNA target sequence
taatagtaaacccgaatggtt

SEQ ID NO: 308830 - DNA, 21 bp, Artificial sequence
  SiRNA target sequence
aatagtaaacccgaatggtta

SEQ ID NO: 308831 - DNA, 21 bp, Artificial sequence
  SiRNA target sequence
atagtaaacccgaatggttaa

SEQ ID NO: 308832 - DNA, 21 bp, Artificial sequence
  SiRNA target sequence
tagtaaacccgaatggttaat

SEQ ID NO: 308833 - DNA, 21 bp, Artificial sequence
  SiRNA target sequence
agtaaacccgaatggttaatt

SEQ ID NO: 308834 - DNA, 21 bp, Artificial sequence
  SiRNA target sequence
gtaaacccgaatggttaattt

SEQ ID NO: 308835 - DNA, 21 bp, Artificial sequence
  SiRNA target sequence
taaacccgaatggttaatttt

SEQ ID NO: 308836 - DNA, 21 bp, Artificial sequence
  SiRNA target sequence
aaacccgaatggttaattttg

SEQ ID NO: 308837 - DNA, 21 bp, Artificial sequence
  SiRNA target sequence
aacccgaatggttaattttga

SEQ ID NO: 308838 - DNA, 21 bp, Artificial sequence
  SiRNA target sequence
acccgaatggttaattttgac

SEQ ID NO: 308839 - DNA, 21 bp, Artificial sequence
  SiRNA target sequence
cccgaatggttaattttgact

SEQ ID NO: 308840 - DNA, 21 bp, Artificial sequence
  SiRNA target sequence
ccgaatggttaattttgactg

SEQ ID NO: 308841 - DNA, 21 bp, Artificial sequence
  SiRNA target sequence
cgaatggttaattttgactgt

SEQ ID NO: 308842 - DNA, 21 bp, Artificial sequence
  SiRNA target sequence
gaatggttaattttgactgtt

SEQ ID NO: 308843 - DNA, 21 bp, Artificial sequence
  SiRNA target sequence
aatggttaattttgactgttt

SEQ ID NO: 308844 - DNA, 21 bp, Artificial sequence
  SiRNA target sequence
atggttaattttgactgtttt

SEQ ID NO: 308845 - DNA, 21 bp, Artificial sequence
  SiRNA target sequence
tggttaattttgactgttttg

SEQ ID NO: 308846 - DNA, 21 bp, Artificial sequence
  SiRNA target sequence
ggttaattttgactgttttgc

SEQ ID NO: 308847 - DNA, 21 bp, Artificial sequence
  SiRNA target sequence
gttaattttgactgttttgct

SEQ ID NO: 308848 - DNA, 21 bp, Artificial sequence
  SiRNA target sequence
ttaattttgactgttttgcta

SEQ ID NO: 308849 - DNA, 21 bp, Artificial sequence
  SiRNA target sequence
taattttgactgttttgctag

SEQ ID NO: 308850 - DNA, 21 bp, Artificial sequence
  SiRNA target sequence
aattttgactgttttgctagt

SEQ ID NO: 308851 - DNA, 21 bp, Artificial sequence
  SiRNA target sequence
attttgactgttttgctagtt

SEQ ID NO: 308852 - DNA, 21 bp, Artificial sequence
  SiRNA target sequence
ttttgactgttttgctagttc

SEQ ID NO: 308853 - DNA, 21 bp, Artificial sequence
  SiRNA target sequence
tttgactgttttgctagttcc

SEQ ID NO: 308854 - DNA, 21 bp, Artificial sequence
  SiRNA target sequence
ttgactgttttgctagttcct

SEQ ID NO: 308855 - DNA, 21 bp, Artificial sequence
  SiRNA target sequence
tgactgttttgctagttcctc

SEQ ID NO: 308856 - DNA, 21 bp, Artificial sequence
  SiRNA target sequence
gactgttttgctagttcctcc

SEQ ID NO: 308857 - DNA, 21 bp, Artificial sequence
  SiRNA target sequence
actgttttgctagttcctcct

SEQ ID NO: 308858 - DNA, 21 bp, Artificial sequence
  SiRNA target sequence
ctgttttgctagttcctcctc

SEQ ID NO: 308859 - DNA, 21 bp, Artificial sequence
  SiRNA target sequence
tgttttgctagttcctcctcc

SEQ ID NO: 308860 - DNA, 21 bp, Artificial sequence
  SiRNA target sequence
gttttgctagttcctcctcct

SEQ ID NO: 308861 - DNA, 21 bp, Artificial sequence
  SiRNA target sequence
ttttgctagttcctcctcctt

SEQ ID NO: 308862 - DNA, 21 bp, Artificial sequence
  SiRNA target sequence
tttgctagttcctcctccttc

SEQ ID NO: 308863 - DNA, 21 bp, Artificial sequence
  SiRNA target sequence
ttgctagttcctcctccttct

SEQ ID NO: 308864 - DNA, 21 bp, Artificial sequence
  SiRNA target sequence
tgctagttcctcctccttctg

SEQ ID NO: 308865 - DNA, 21 bp, Artificial sequence
  SiRNA target sequence
gctagttcctcctccttctgt

SEQ ID NO: 308866 - DNA, 21 bp, Artificial sequence
  SiRNA target sequence
ctagttcctcctccttctgta

SEQ ID NO: 308867 - DNA, 21 bp, Artificial sequence
  SiRNA target sequence
tagttcctcctccttctgtaa

SEQ ID NO: 308868 - DNA, 21 bp, Artificial sequence
  SiRNA target sequence
agttcctcctccttctgtaag

SEQ ID NO: 308869 - DNA, 21 bp, Artificial sequence
  SiRNA target sequence
gttcctcctccttctgtaaga

SEQ ID NO: 308870 - DNA, 21 bp, Artificial sequence
  SiRNA target sequence
ttcctcctccttctgtaagac

SEQ ID NO: 308871 - DNA, 21 bp, Artificial sequence
  SiRNA target sequence
tcctcctccttctgtaagacc

SEQ ID NO: 308872 - DNA, 21 bp, Artificial sequence
  SiRNA target sequence
cctcctccttctgtaagacct

SEQ ID NO: 308873 - DNA, 21 bp, Artificial sequence
  SiRNA target sequence
ctcctccttctgtaagacctt

SEQ ID NO: 308874 - DNA, 21 bp, Artificial sequence
  SiRNA target sequence
tcctccttctgtaagaccttc

SEQ ID NO: 308875 - DNA, 21 bp, Artificial sequence
  SiRNA target sequence
cctccttctgtaagaccttct

SEQ ID NO: 308876 - DNA, 21 bp, Artificial sequence
  SiRNA target sequence
ctccttctgtaagaccttcta

SEQ ID NO: 308877 - DNA, 21 bp, Artificial sequence
  SiRNA target sequence
tccttctgtaagaccttctat

SEQ ID NO: 308878 - DNA, 21 bp, Artificial sequence
  SiRNA target sequence
ccttctgtaagaccttctatt

SEQ ID NO: 308879 - DNA, 21 bp, Artificial sequence
  SiRNA target sequence
cttctgtaagaccttctattg

SEQ ID NO: 308880 - DNA, 21 bp, Artificial sequence
  SiRNA target sequence
ttctgtaagaccttctattgt

SEQ ID NO: 308881 - DNA, 21 bp, Artificial sequence
  SiRNA target sequence
tctgtaagaccttctattgtt

SEQ ID NO: 308882 - DNA, 21 bp, Artificial sequence
  SiRNA target sequence
ctgtaagaccttctattgtta

SEQ ID NO: 308883 - DNA, 21 bp, Artificial sequence
  SiRNA target sequence
tgtaagaccttctattgttat

SEQ ID NO: 308884 - DNA, 21 bp, Artificial sequence
  SiRNA target sequence
gtaagaccttctattgttatg

SEQ ID NO: 308885 - DNA, 21 bp, Artificial sequence
  SiRNA target sequence
taagaccttctattgttatgg

SEQ ID NO: 308886 - DNA, 21 bp, Artificial sequence
  SiRNA target sequence
aagaccttctattgttatgga

SEQ ID NO: 308887 - DNA, 21 bp, Artificial sequence
  SiRNA target sequence
agaccttctattgttatggag

SEQ ID NO: 308888 - DNA, 21 bp, Artificial sequence
  SiRNA target sequence
gaccttctattgttatggagg

SEQ ID NO: 308889 - DNA, 21 bp, Artificial sequence
  SiRNA target sequence
accttctattgttatggaggg

SEQ ID NO: 308890 - DNA, 21 bp, Artificial sequence
  SiRNA target sequence
ccttctattgttatggaggga

SEQ ID NO: 308891 - DNA, 21 bp, Artificial sequence
  SiRNA target sequence
cttctattgttatggagggaa

SEQ ID NO: 308892 - DNA, 21 bp, Artificial sequence
  SiRNA target sequence
ttctattgttatggagggaat

SEQ ID NO: 308893 - DNA, 21 bp, Artificial sequence
  SiRNA target sequence
tctattgttatggagggaatg

SEQ ID NO: 308894 - DNA, 21 bp, Artificial sequence
  SiRNA target sequence
ctattgttatggagggaatgt

SEQ ID NO: 308895 - DNA, 21 bp, Artificial sequence
  SiRNA target sequence
tattgttatggagggaatgtt

SEQ ID NO: 308896 - DNA, 21 bp, Artificial sequence
  SiRNA target sequence
attgttatggagggaatgtta

SEQ ID NO: 308897 - DNA, 21 bp, Artificial sequence
  SiRNA target sequence
ttgttatggagggaatgttaa

SEQ ID NO: 308898 - DNA, 21 bp, Artificial sequence
  SiRNA target sequence
tgttatggagggaatgttaag

SEQ ID NO: 308899 - DNA, 21 bp, Artificial sequence
  SiRNA target sequence
gttatggagggaatgttaaga

SEQ ID NO: 308900 - DNA, 21 bp, Artificial sequence
  SiRNA target sequence
ttatggagggaatgttaagag

SEQ ID NO: 308901 - DNA, 21 bp, Artificial sequence
  SiRNA target sequence
tatggagggaatgttaagagc

SEQ ID NO: 308902 - DNA, 21 bp, Artificial sequence
  SiRNA target sequence
atggagggaatgttaagagca

SEQ ID NO: 308903 - DNA, 21 bp, Artificial sequence
  SiRNA target sequence
tggagggaatgttaagagcag

SEQ ID NO: 308904 - DNA, 21 bp, Artificial sequence
  SiRNA target sequence
ggagggaatgttaagagcaga

SEQ ID NO: 308905 - DNA, 21 bp, Artificial sequence
  SiRNA target sequence
gagggaatgttaagagcagaa

SEQ ID NO: 308906 - DNA, 21 bp, Artificial sequence
  SiRNA target sequence
agggaatgttaagagcagaag

SEQ ID NO: 308907 - DNA, 21 bp, Artificial sequence
  SiRNA target sequence
gggaatgttaagagcagaaga

SEQ ID NO: 308908 - DNA, 21 bp, Artificial sequence
  SiRNA target sequence
ggaatgttaagagcagaagat

SEQ ID NO: 308909 - DNA, 21 bp, Artificial sequence
  SiRNA target sequence
gaatgttaagagcagaagatg

SEQ ID NO: 308910 - DNA, 21 bp, Artificial sequence
  SiRNA target sequence
aatgttaagagcagaagatga

SEQ ID NO: 308911 - DNA, 21 bp, Artificial sequence
  SiRNA target sequence
atgttaagagcagaagatgat

SEQ ID NO: 308912 - DNA, 21 bp, Artificial sequence
  SiRNA target sequence
tgttaagagcagaagatgatc

SEQ ID NO: 308913 - DNA, 21 bp, Artificial sequence
  SiRNA target sequence
gttaagagcagaagatgatct

SEQ ID NO: 308914 - DNA, 21 bp, Artificial sequence
  SiRNA target sequence
ttaagagcagaagatgatcta

SEQ ID NO: 308915 - DNA, 21 bp, Artificial sequence
  SiRNA target sequence
taagagcagaagatgatctaa

SEQ ID NO: 308916 - DNA, 21 bp, Artificial sequence
  SiRNA target sequence
aagagcagaagatgatctaac

SEQ ID NO: 308917 - DNA, 21 bp, Artificial sequence
  SiRNA target sequence
agagcagaagatgatctaaca

SEQ ID NO: 308918 - DNA, 21 bp, Artificial sequence
  SiRNA target sequence
gagcagaagatgatctaacac

SEQ ID NO: 308919 - DNA, 21 bp, Artificial sequence
  SiRNA target sequence
agcagaagatgatctaacaca

SEQ ID NO: 308920 - DNA, 21 bp, Artificial sequence
  SiRNA target sequence
gcagaagatgatctaacacac

SEQ ID NO: 308921 - DNA, 21 bp, Artificial sequence
  SiRNA target sequence
cagaagatgatctaacacaca

SEQ ID NO: 308922 - DNA, 21 bp, Artificial sequence
  SiRNA target sequence
agaagatgatctaacacacaa

SEQ ID NO: 308923 - DNA, 21 bp, Artificial sequence
  SiRNA target sequence
gaagatgatctaacacacaaa

SEQ ID NO: 308924 - DNA, 21 bp, Artificial sequence
  SiRNA target sequence
aagatgatctaacacacaaat

SEQ ID NO: 308925 - DNA, 21 bp, Artificial sequence
  SiRNA target sequence
agatgatctaacacacaaatt

SEQ ID NO: 308926 - DNA, 21 bp, Artificial sequence
  SiRNA target sequence
gatgatctaacacacaaattg

SEQ ID NO: 308927 - DNA, 21 bp, Artificial sequence
  SiRNA target sequence
atgatctaacacacaaattgg

SEQ ID NO: 308928 - DNA, 21 bp, Artificial sequence
  SiRNA target sequence
tgatctaacacacaaattggc

SEQ ID NO: 308929 - DNA, 21 bp, Artificial sequence
  SiRNA target sequence
gatctaacacacaaattggct

SEQ ID NO: 308930 - DNA, 21 bp, Artificial sequence
  SiRNA target sequence
atctaacacacaaattggctg

SEQ ID NO: 308931 - DNA, 21 bp, Artificial sequence
  SiRNA target sequence
tctaacacacaaattggctga

SEQ ID NO: 308932 - DNA, 21 bp, Artificial sequence
  SiRNA target sequence
ctaacacacaaattggctgat

SEQ ID NO: 308933 - DNA, 21 bp, Artificial sequence
  SiRNA target sequence
taacacacaaattggctgata

SEQ ID NO: 308934 - DNA, 21 bp, Artificial sequence
  SiRNA target sequence
aacacacaaattggctgatat

SEQ ID NO: 308935 - DNA, 21 bp, Artificial sequence
  SiRNA target sequence
acacacaaattggctgatatt

SEQ ID NO: 308936 - DNA, 21 bp, Artificial sequence
  SiRNA target sequence
cacacaaattggctgatatta

SEQ ID NO: 308937 - DNA, 21 bp, Artificial sequence
  SiRNA target sequence
acacaaattggctgatattat

SEQ ID NO: 308938 - DNA, 21 bp, Artificial sequence
  SiRNA target sequence
cacaaattggctgatattata

SEQ ID NO: 308939 - DNA, 21 bp, Artificial sequence
  SiRNA target sequence
acaaattggctgatattataa

SEQ ID NO: 308940 - DNA, 21 bp, Artificial sequence
  SiRNA target sequence
caaattggctgatattataaa

SEQ ID NO: 308941 - DNA, 21 bp, Artificial sequence
  SiRNA target sequence
aaattggctgatattataaaa

SEQ ID NO: 308942 - DNA, 21 bp, Artificial sequence
  SiRNA target sequence
aattggctgatattataaaag

SEQ ID NO: 308943 - DNA, 21 bp, Artificial sequence
  SiRNA target sequence
attggctgatattataaaagc

SEQ ID NO: 308944 - DNA, 21 bp, Artificial sequence
  SiRNA target sequence
ttggctgatattataaaagca

SEQ ID NO: 308945 - DNA, 21 bp, Artificial sequence
  SiRNA target sequence
tggctgatattataaaagcaa

SEQ ID NO: 308946 - DNA, 21 bp, Artificial sequence
  SiRNA target sequence
ggctgatattataaaagcaaa

SEQ ID NO: 308947 - DNA, 21 bp, Artificial sequence
  SiRNA target sequence
gctgatattataaaagcaaat

SEQ ID NO: 308948 - DNA, 21 bp, Artificial sequence
  SiRNA target sequence
ctgatattataaaagcaaata

SEQ ID NO: 308949 - DNA, 21 bp, Artificial sequence
  SiRNA target sequence
tgatattataaaagcaaatac

SEQ ID NO: 308950 - DNA, 21 bp, Artificial sequence
  SiRNA target sequence
gatattataaaagcaaataca

SEQ ID NO: 308951 - DNA, 21 bp, Artificial sequence
  SiRNA target sequence
atattataaaagcaaatacat

SEQ ID NO: 308952 - DNA, 21 bp, Artificial sequence
  SiRNA target sequence
tattataaaagcaaatacata

SEQ ID NO: 308953 - DNA, 21 bp, Artificial sequence
  SiRNA target sequence
attataaaagcaaatacatat

SEQ ID NO: 308954 - DNA, 21 bp, Artificial sequence
  SiRNA target sequence
ttataaaagcaaatacatatt

SEQ ID NO: 308955 - DNA, 21 bp, Artificial sequence
  SiRNA target sequence
tataaaagcaaatacatattt

SEQ ID NO: 308956 - DNA, 21 bp, Artificial sequence
  SiRNA target sequence
ataaaagcaaatacatattta

SEQ ID NO: 308957 - DNA, 21 bp, Artificial sequence
  SiRNA target sequence
taaaagcaaatacatatttaa

SEQ ID NO: 308958 - DNA, 21 bp, Artificial sequence
  SiRNA target sequence
aaaagcaaatacatatttaaa

SEQ ID NO: 308959 - DNA, 21 bp, Artificial sequence
  SiRNA target sequence
aaagcaaatacatatttaaaa

SEQ ID NO: 308960 - DNA, 21 bp, Artificial sequence
  SiRNA target sequence
aagcaaatacatatttaaaaa

SEQ ID NO: 308961 - DNA, 21 bp, Artificial sequence
  SiRNA target sequence
agcaaatacatatttaaaaaa

SEQ ID NO: 308962 - DNA, 21 bp, Artificial sequence
  SiRNA target sequence
gcaaatacatatttaaaaaaa

SEQ ID NO: 308963 - DNA, 21 bp, Artificial sequence
  SiRNA target sequence
caaatacatatttaaaaaaat

SEQ ID NO: 308964 - DNA, 21 bp, Artificial sequence
  SiRNA target sequence
aaatacatatttaaaaaaata

SEQ ID NO: 308965 - DNA, 21 bp, Artificial sequence
  SiRNA target sequence
aatacatatttaaaaaaatat

SEQ ID NO: 308966 - DNA, 21 bp, Artificial sequence
  SiRNA target sequence
atacatatttaaaaaaatatg

SEQ ID NO: 308967 - DNA, 21 bp, Artificial sequence
  SiRNA target sequence
tacatatttaaaaaaatatga

SEQ ID NO: 308968 - DNA, 21 bp, Artificial sequence
  SiRNA target sequence
acatatttaaaaaaatatgag

SEQ ID NO: 308969 - DNA, 21 bp, Artificial sequence
  SiRNA target sequence
catatttaaaaaaatatgagt

SEQ ID NO: 308970 - DNA, 21 bp, Artificial sequence
  SiRNA target sequence
atatttaaaaaaatatgagtt

SEQ ID NO: 308971 - DNA, 21 bp, Artificial sequence
  SiRNA target sequence
tatttaaaaaaatatgagttg

SEQ ID NO: 308972 - DNA, 21 bp, Artificial sequence
  SiRNA target sequence
atttaaaaaaatatgagttgg

SEQ ID NO: 308973 - DNA, 21 bp, Artificial sequence
  SiRNA target sequence
tttaaaaaaatatgagttgga

SEQ ID NO: 308974 - DNA, 21 bp, Artificial sequence
  SiRNA target sequence
ttaaaaaaatatgagttggaa

SEQ ID NO: 308975 - DNA, 21 bp, Artificial sequence
  SiRNA target sequence
taaaaaaatatgagttggaag

SEQ ID NO: 308976 - DNA, 21 bp, Artificial sequence
  SiRNA target sequence
aaaaaaatatgagttggaagg

SEQ ID NO: 308977 - DNA, 21 bp, Artificial sequence
  SiRNA target sequence
aaaaaatatgagttggaaggc

SEQ ID NO: 308978 - DNA, 21 bp, Artificial sequence
  SiRNA target sequence
aaaaatatgagttggaaggcg

SEQ ID NO: 308979 - DNA, 21 bp, Artificial sequence
  SiRNA target sequence
aaaatatgagttggaaggcgc

SEQ ID NO: 308980 - DNA, 21 bp, Artificial sequence
  SiRNA target sequence
aaatatgagttggaaggcgct

SEQ ID NO: 308981 - DNA, 21 bp, Artificial sequence
  SiRNA target sequence
aatatgagttggaaggcgctc

SEQ ID NO: 308982 - DNA, 21 bp, Artificial sequence
  SiRNA target sequence
atatgagttggaaggcgctcc

SEQ ID NO: 308983 - DNA, 21 bp, Artificial sequence
  SiRNA target sequence
tatgagttggaaggcgctcct

SEQ ID NO: 308984 - DNA, 21 bp, Artificial sequence
  SiRNA target sequence
atgagttggaaggcgctcctg

SEQ ID NO: 308985 - DNA, 21 bp, Artificial sequence
  SiRNA target sequence
tgagttggaaggcgctcctgg

SEQ ID NO: 308986 - DNA, 21 bp, Artificial sequence
  SiRNA target sequence
gagttggaaggcgctcctggt

SEQ ID NO: 308987 - DNA, 21 bp, Artificial sequence
  SiRNA target sequence
agttggaaggcgctcctggtc

SEQ ID NO: 308988 - DNA, 21 bp, Artificial sequence
  SiRNA target sequence
gttggaaggcgctcctggtca

SEQ ID NO: 308989 - DNA, 21 bp, Artificial sequence
  SiRNA target sequence
ttggaaggcgctcctggtcat

SEQ ID NO: 308990 - DNA, 21 bp, Artificial sequence
  SiRNA target sequence
tggaaggcgctcctggtcatg

SEQ ID NO: 308991 - DNA, 21 bp, Artificial sequence
  SiRNA target sequence
ggaaggcgctcctggtcatgt

SEQ ID NO: 308992 - DNA, 21 bp, Artificial sequence
  SiRNA target sequence
gaaggcgctcctggtcatgtt

SEQ ID NO: 308993 - DNA, 21 bp, Artificial sequence
  SiRNA target sequence
aaggcgctcctggtcatgtta

SEQ ID NO: 308994 - DNA, 21 bp, Artificial sequence
  SiRNA target sequence
aggcgctcctggtcatgttat

SEQ ID NO: 308995 - DNA, 21 bp, Artificial sequence
  SiRNA target sequence
ggcgctcctggtcatgttata

SEQ ID NO: 308996 - DNA, 21 bp, Artificial sequence
  SiRNA target sequence
gcgctcctggtcatgttataa

SEQ ID NO: 308997 - DNA, 21 bp, Artificial sequence
  SiRNA target sequence
cgctcctggtcatgttataag

SEQ ID NO: 308998 - DNA, 21 bp, Artificial sequence
  SiRNA target sequence
gctcctggtcatgttataagg

SEQ ID NO: 308999 - DNA, 21 bp, Artificial sequence
  SiRNA target sequence
ctcctggtcatgttataaggg

SEQ ID NO: 309000 - DNA, 21 bp, Artificial sequence
  SiRNA target sequence
tcctggtcatgttataaggga

SEQ ID NO: 309001 - DNA, 21 bp, Artificial sequence
  SiRNA target sequence
cctggtcatgttataagggat

SEQ ID NO: 309002 - DNA, 21 bp, Artificial sequence
  SiRNA target sequence
ctggtcatgttataagggatt

SEQ ID NO: 309003 - DNA, 21 bp, Artificial sequence
  SiRNA target sequence
tggtcatgttataagggatta

SEQ ID NO: 309004 - DNA, 21 bp, Artificial sequence
  SiRNA target sequence
ggtcatgttataagggattat

SEQ ID NO: 309005 - DNA, 21 bp, Artificial sequence
  SiRNA target sequence
gtcatgttataagggattatg

SEQ ID NO: 309006 - DNA, 21 bp, Artificial sequence
  SiRNA target sequence
tcatgttataagggattatga

SEQ ID NO: 309007 - DNA, 21 bp, Artificial sequence
  SiRNA target sequence
catgttataagggattatgaa

SEQ ID NO: 309008 - DNA, 21 bp, Artificial sequence
  SiRNA target sequence
atgttataagggattatgaac

SEQ ID NO: 309009 - DNA, 21 bp, Artificial sequence
  SiRNA target sequence
tgttataagggattatgaaca

SEQ ID NO: 309010 - DNA, 21 bp, Artificial sequence
  SiRNA target sequence
gttataagggattatgaacaa

SEQ ID NO: 309011 - DNA, 21 bp, Artificial sequence
  SiRNA target sequence
ttataagggattatgaacaat

SEQ ID NO: 309012 - DNA, 21 bp, Artificial sequence
  SiRNA target sequence
tataagggattatgaacaatt

SEQ ID NO: 309013 - DNA, 21 bp, Artificial sequence
  SiRNA target sequence
ataagggattatgaacaatta

SEQ ID NO: 309014 - DNA, 21 bp, Artificial sequence
  SiRNA target sequence
taagggattatgaacaattac

SEQ ID NO: 309015 - DNA, 21 bp, Artificial sequence
  SiRNA target sequence
aagggattatgaacaattact

SEQ ID NO: 309016 - DNA, 21 bp, Artificial sequence
  SiRNA target sequence
agggattatgaacaattacta

SEQ ID NO: 309017 - DNA, 21 bp, Artificial sequence
  SiRNA target sequence
gggattatgaacaattactac

SEQ ID NO: 309018 - DNA, 21 bp, Artificial sequence
  SiRNA target sequence
ggattatgaacaattactaca

SEQ ID NO: 309019 - DNA, 21 bp, Artificial sequence
  SiRNA target sequence
gattatgaacaattactacaa

SEQ ID NO: 309020 - DNA, 21 bp, Artificial sequence
  SiRNA target sequence
attatgaacaattactacaat

SEQ ID NO: 309021 - DNA, 21 bp, Artificial sequence
  SiRNA target sequence
ttatgaacaattactacaatt

SEQ ID NO: 309022 - DNA, 21 bp, Artificial sequence
  SiRNA target sequence
tatgaacaattactacaattt

SEQ ID NO: 309023 - DNA, 21 bp, Artificial sequence
  SiRNA target sequence
atgaacaattactacaatttc

SEQ ID NO: 309024 - DNA, 21 bp, Artificial sequence
  SiRNA target sequence
tgaacaattactacaatttca

SEQ ID NO: 309025 - DNA, 21 bp, Artificial sequence
  SiRNA target sequence
gaacaattactacaatttcat

SEQ ID NO: 309026 - DNA, 21 bp, Artificial sequence
  SiRNA target sequence
aacaattactacaatttcata

SEQ ID NO: 309027 - DNA, 21 bp, Artificial sequence
  SiRNA target sequence
acaattactacaatttcatat

SEQ ID NO: 309028 - DNA, 21 bp, Artificial sequence
  SiRNA target sequence
caattactacaatttcatatg

SEQ ID NO: 309029 - DNA, 21 bp, Artificial sequence
  SiRNA target sequence
aattactacaatttcatatgg

SEQ ID NO: 309030 - DNA, 21 bp, Artificial sequence
  SiRNA target sequence
attactacaatttcatatggc

SEQ ID NO: 309031 - DNA, 21 bp, Artificial sequence
  SiRNA target sequence
ttactacaatttcatatggct

SEQ ID NO: 309032 - DNA, 21 bp, Artificial sequence
  SiRNA target sequence
tactacaatttcatatggcta

SEQ ID NO: 309033 - DNA, 21 bp, Artificial sequence
  SiRNA target sequence
actacaatttcatatggctac

SEQ ID NO: 309034 - DNA, 21 bp, Artificial sequence
  SiRNA target sequence
ctacaatttcatatggctaca

SEQ ID NO: 309035 - DNA, 21 bp, Artificial sequence
  SiRNA target sequence
tacaatttcatatggctacaa

SEQ ID NO: 309036 - DNA, 21 bp, Artificial sequence
  SiRNA target sequence
acaatttcatatggctacaat

SEQ ID NO: 309037 - DNA, 21 bp, Artificial sequence
  SiRNA target sequence
caatttcatatggctacaatg

SEQ ID NO: 309038 - DNA, 21 bp, Artificial sequence
  SiRNA target sequence
aatttcatatggctacaatgg

SEQ ID NO: 309039 - DNA, 21 bp, Artificial sequence
  SiRNA target sequence
atttcatatggctacaatggt

SEQ ID NO: 309040 - DNA, 21 bp, Artificial sequence
  SiRNA target sequence
tttcatatggctacaatggta

SEQ ID NO: 309041 - DNA, 21 bp, Artificial sequence
  SiRNA target sequence
ttcatatggctacaatggtag

SEQ ID NO: 309042 - DNA, 21 bp, Artificial sequence
  SiRNA target sequence
tcatatggctacaatggtaga

SEQ ID NO: 309043 - DNA, 21 bp, Artificial sequence
  SiRNA target sequence
catatggctacaatggtagat

SEQ ID NO: 309044 - DNA, 21 bp, Artificial sequence
  SiRNA target sequence
atatggctacaatggtagata

SEQ ID NO: 309045 - DNA, 21 bp, Artificial sequence
  SiRNA target sequence
tatggctacaatggtagataa

SEQ ID NO: 309046 - DNA, 21 bp, Artificial sequence
  SiRNA target sequence
atggctacaatggtagataat

SEQ ID NO: 309047 - DNA, 21 bp, Artificial sequence
  SiRNA target sequence
tggctacaatggtagataatg

SEQ ID NO: 309048 - DNA, 21 bp, Artificial sequence
  SiRNA target sequence
ggctacaatggtagataatga

SEQ ID NO: 309049 - DNA, 21 bp, Artificial sequence
  SiRNA target sequence
gctacaatggtagataatgat

SEQ ID NO: 309050 - DNA, 21 bp, Artificial sequence
  SiRNA target sequence
ctacaatggtagataatgatt

SEQ ID NO: 309051 - DNA, 21 bp, Artificial sequence
  SiRNA target sequence
tacaatggtagataatgattt

SEQ ID NO: 309052 - DNA, 21 bp, Artificial sequence
  SiRNA target sequence
acaatggtagataatgattta

SEQ ID NO: 309053 - DNA, 21 bp, Artificial sequence
  SiRNA target sequence
caatggtagataatgatttaa

SEQ ID NO: 309054 - DNA, 21 bp, Artificial sequence
  SiRNA target sequence
aatggtagataatgatttaag

SEQ ID NO: 309055 - DNA, 21 bp, Artificial sequence
  SiRNA target sequence
atggtagataatgatttaagt

SEQ ID NO: 309056 - DNA, 21 bp, Artificial sequence
  SiRNA target sequence
tggtagataatgatttaagtg

SEQ ID NO: 309057 - DNA, 21 bp, Artificial sequence
  SiRNA target sequence
ggtagataatgatttaagtgg

SEQ ID NO: 309058 - DNA, 21 bp, Artificial sequence
  SiRNA target sequence
gtagataatgatttaagtgga

SEQ ID NO: 309059 - DNA, 21 bp, Artificial sequence
  SiRNA target sequence
tagataatgatttaagtggac

SEQ ID NO: 309060 - DNA, 21 bp, Artificial sequence
  SiRNA target sequence
agataatgatttaagtggaca

SEQ ID NO: 309061 - DNA, 21 bp, Artificial sequence
  SiRNA target sequence
gataatgatttaagtggacaa

SEQ ID NO: 309062 - DNA, 21 bp, Artificial sequence
  SiRNA target sequence
ataatgatttaagtggacaac

SEQ ID NO: 309063 - DNA, 21 bp, Artificial sequence
  SiRNA target sequence
taatgatttaagtggacaacc

SEQ ID NO: 309064 - DNA, 21 bp, Artificial sequence
  SiRNA target sequence
aatgatttaagtggacaacca

SEQ ID NO: 309065 - DNA, 21 bp, Artificial sequence
  SiRNA target sequence
atgatttaagtggacaaccac

SEQ ID NO: 309066 - DNA, 21 bp, Artificial sequence
  SiRNA target sequence
tgatttaagtggacaaccaca

SEQ ID NO: 309067 - DNA, 21 bp, Artificial sequence
  SiRNA target sequence
gatttaagtggacaaccacaa

SEQ ID NO: 309068 - DNA, 21 bp, Artificial sequence
  SiRNA target sequence
atttaagtggacaaccacaag

SEQ ID NO: 309069 - DNA, 21 bp, Artificial sequence
  SiRNA target sequence
tttaagtggacaaccacaagc

SEQ ID NO: 309070 - DNA, 21 bp, Artificial sequence
  SiRNA target sequence
ttaagtggacaaccacaagct

SEQ ID NO: 309071 - DNA, 21 bp, Artificial sequence
  SiRNA target sequence
taagtggacaaccacaagctt

SEQ ID NO: 309072 - DNA, 21 bp, Artificial sequence
  SiRNA target sequence
aagtggacaaccacaagcttt

SEQ ID NO: 309073 - DNA, 21 bp, Artificial sequence
  SiRNA target sequence
agtggacaaccacaagcttta

SEQ ID NO: 309074 - DNA, 21 bp, Artificial sequence
  SiRNA target sequence
gtggacaaccacaagctttac

SEQ ID NO: 309075 - DNA, 21 bp, Artificial sequence
  SiRNA target sequence
tggacaaccacaagctttaca

SEQ ID NO: 309076 - DNA, 21 bp, Artificial sequence
  SiRNA target sequence
ggacaaccacaagctttacaa

SEQ ID NO: 309077 - DNA, 21 bp, Artificial sequence
  SiRNA target sequence
gacaaccacaagctttacaaa

SEQ ID NO: 309078 - DNA, 21 bp, Artificial sequence
  SiRNA target sequence
acaaccacaagctttacaaaa

SEQ ID NO: 309079 - DNA, 21 bp, Artificial sequence
  SiRNA target sequence
caaccacaagctttacaaaaa

SEQ ID NO: 309080 - DNA, 21 bp, Artificial sequence
  SiRNA target sequence
aaccacaagctttacaaaaaa

SEQ ID NO: 309081 - DNA, 21 bp, Artificial sequence
  SiRNA target sequence
accacaagctttacaaaaaag

SEQ ID NO: 309082 - DNA, 21 bp, Artificial sequence
  SiRNA target sequence
ccacaagctttacaaaaaagt

SEQ ID NO: 309083 - DNA, 21 bp, Artificial sequence
  SiRNA target sequence
cacaagctttacaaaaaagtg

SEQ ID NO: 309084 - DNA, 21 bp, Artificial sequence
  SiRNA target sequence
acaagctttacaaaaaagtgg

SEQ ID NO: 309085 - DNA, 21 bp, Artificial sequence
  SiRNA target sequence
caagctttacaaaaaagtgga

SEQ ID NO: 309086 - DNA, 21 bp, Artificial sequence
  SiRNA target sequence
aagctttacaaaaaagtggaa

SEQ ID NO: 309087 - DNA, 21 bp, Artificial sequence
  SiRNA target sequence
agctttacaaaaaagtggaag

SEQ ID NO: 309088 - DNA, 21 bp, Artificial sequence
  SiRNA target sequence
gctttacaaaaaagtggaagg

SEQ ID NO: 309089 - DNA, 21 bp, Artificial sequence
  SiRNA target sequence
ctttacaaaaaagtggaaggc

SEQ ID NO: 309090 - DNA, 21 bp, Artificial sequence
  SiRNA target sequence
tttacaaaaaagtggaaggcc

SEQ ID NO: 309091 - DNA, 21 bp, Artificial sequence
  SiRNA target sequence
ttacaaaaaagtggaaggcct

SEQ ID NO: 309092 - DNA, 21 bp, Artificial sequence
  SiRNA target sequence
tacaaaaaagtggaaggccta

SEQ ID NO: 309093 - DNA, 21 bp, Artificial sequence
  SiRNA target sequence
acaaaaaagtggaaggcctat

SEQ ID NO: 309094 - DNA, 21 bp, Artificial sequence
  SiRNA target sequence
caaaaaagtggaaggcctata

SEQ ID NO: 309095 - DNA, 21 bp, Artificial sequence
  SiRNA target sequence
aaaaaagtggaaggcctataa

SEQ ID NO: 309096 - DNA, 21 bp, Artificial sequence
  SiRNA target sequence
aaaaagtggaaggcctataaa

SEQ ID NO: 309097 - DNA, 21 bp, Artificial sequence
  SiRNA target sequence
aaaagtggaaggcctataaag

SEQ ID NO: 309098 - DNA, 21 bp, Artificial sequence
  SiRNA target sequence
aaagtggaaggcctataaagt

SEQ ID NO: 309099 - DNA, 21 bp, Artificial sequence
  SiRNA target sequence
aagtggaaggcctataaagtc

SEQ ID NO: 309100 - DNA, 21 bp, Artificial sequence
  SiRNA target sequence
agtggaaggcctataaagtcg

SEQ ID NO: 309101 - DNA, 21 bp, Artificial sequence
  SiRNA target sequence
gtggaaggcctataaagtcga

SEQ ID NO: 309102 - DNA, 21 bp, Artificial sequence
  SiRNA target sequence
tggaaggcctataaagtcgat

SEQ ID NO: 309103 - DNA, 21 bp, Artificial sequence
  SiRNA target sequence
ggaaggcctataaagtcgatt

SEQ ID NO: 309104 - DNA, 21 bp, Artificial sequence
  SiRNA target sequence
gaaggcctataaagtcgatta

SEQ ID NO: 309105 - DNA, 21 bp, Artificial sequence
  SiRNA target sequence
aaggcctataaagtcgattag

SEQ ID NO: 309106 - DNA, 21 bp, Artificial sequence
  SiRNA target sequence
aggcctataaagtcgattagt

SEQ ID NO: 309107 - DNA, 21 bp, Artificial sequence
  SiRNA target sequence
ggcctataaagtcgattagtg

SEQ ID NO: 309108 - DNA, 21 bp, Artificial sequence
  SiRNA target sequence
gcctataaagtcgattagtgc

SEQ ID NO: 309109 - DNA, 21 bp, Artificial sequence
  SiRNA target sequence
cctataaagtcgattagtgct

SEQ ID NO: 309110 - DNA, 21 bp, Artificial sequence
  SiRNA target sequence
ctataaagtcgattagtgcta

SEQ ID NO: 309111 - DNA, 21 bp, Artificial sequence
  SiRNA target sequence
tataaagtcgattagtgctag

SEQ ID NO: 309112 - DNA, 21 bp, Artificial sequence
  SiRNA target sequence
ataaagtcgattagtgctaga

SEQ ID NO: 309113 - DNA, 21 bp, Artificial sequence
  SiRNA target sequence
taaagtcgattagtgctagat

SEQ ID NO: 309114 - DNA, 21 bp, Artificial sequence
  SiRNA target sequence
aaagtcgattagtgctagatt

SEQ ID NO: 309115 - DNA, 21 bp, Artificial sequence
  SiRNA target sequence
aagtcgattagtgctagatta

SEQ ID NO: 309116 - DNA, 21 bp, Artificial sequence
  SiRNA target sequence
agtcgattagtgctagattaa

SEQ ID NO: 309117 - DNA, 21 bp, Artificial sequence
  SiRNA target sequence
gtcgattagtgctagattaaa

SEQ ID NO: 309118 - DNA, 21 bp, Artificial sequence
  SiRNA target sequence
tcgattagtgctagattaaaa

SEQ ID NO: 309119 - DNA, 21 bp, Artificial sequence
  SiRNA target sequence
cgattagtgctagattaaaag

SEQ ID NO: 309120 - DNA, 21 bp, Artificial sequence
  SiRNA target sequence
gattagtgctagattaaaagg

SEQ ID NO: 309121 - DNA, 21 bp, Artificial sequence
  SiRNA target sequence
attagtgctagattaaaagga

SEQ ID NO: 309122 - DNA, 21 bp, Artificial sequence
  SiRNA target sequence
ttagtgctagattaaaaggaa

SEQ ID NO: 309123 - DNA, 21 bp, Artificial sequence
  SiRNA target sequence
tagtgctagattaaaaggaaa

SEQ ID NO: 309124 - DNA, 21 bp, Artificial sequence
  SiRNA target sequence
agtgctagattaaaaggaaaa

SEQ ID NO: 309125 - DNA, 21 bp, Artificial sequence
  SiRNA target sequence
gtgctagattaaaaggaaaag

SEQ ID NO: 309126 - DNA, 21 bp, Artificial sequence
  SiRNA target sequence
tgctagattaaaaggaaaaga

SEQ ID NO: 309127 - DNA, 21 bp, Artificial sequence
  SiRNA target sequence
gctagattaaaaggaaaagaa

SEQ ID NO: 309128 - DNA, 21 bp, Artificial sequence
  SiRNA target sequence
ctagattaaaaggaaaagaag

SEQ ID NO: 309129 - DNA, 21 bp, Artificial sequence
  SiRNA target sequence
tagattaaaaggaaaagaagg

SEQ ID NO: 309130 - DNA, 21 bp, Artificial sequence
  SiRNA target sequence
agattaaaaggaaaagaaggt

SEQ ID NO: 309131 - DNA, 21 bp, Artificial sequence
  SiRNA target sequence
gattaaaaggaaaagaaggtc

SEQ ID NO: 309132 - DNA, 21 bp, Artificial sequence
  SiRNA target sequence
attaaaaggaaaagaaggtcg

SEQ ID NO: 309133 - DNA, 21 bp, Artificial sequence
  SiRNA target sequence
ttaaaaggaaaagaaggtcga

SEQ ID NO: 309134 - DNA, 21 bp, Artificial sequence
  SiRNA target sequence
taaaaggaaaagaaggtcgag

SEQ ID NO: 309135 - DNA, 21 bp, Artificial sequence
  SiRNA target sequence
aaaaggaaaagaaggtcgagt

SEQ ID NO: 309136 - DNA, 21 bp, Artificial sequence
  SiRNA target sequence
aaaggaaaagaaggtcgagta

SEQ ID NO: 309137 - DNA, 21 bp, Artificial sequence
  SiRNA target sequence
aaggaaaagaaggtcgagtac

SEQ ID NO: 309138 - DNA, 21 bp, Artificial sequence
  SiRNA target sequence
aggaaaagaaggtcgagtacg

SEQ ID NO: 309139 - DNA, 21 bp, Artificial sequence
  SiRNA target sequence
ggaaaagaaggtcgagtacga

SEQ ID NO: 309140 - DNA, 21 bp, Artificial sequence
  SiRNA target sequence
gaaaagaaggtcgagtacgag

SEQ ID NO: 309141 - DNA, 21 bp, Artificial sequence
  SiRNA target sequence
aaaagaaggtcgagtacgagg

SEQ ID NO: 309142 - DNA, 21 bp, Artificial sequence
  SiRNA target sequence
aaagaaggtcgagtacgagga

SEQ ID NO: 309143 - DNA, 21 bp, Artificial sequence
  SiRNA target sequence
aagaaggtcgagtacgaggaa

SEQ ID NO: 309144 - DNA, 21 bp, Artificial sequence
  SiRNA target sequence
agaaggtcgagtacgaggaaa

SEQ ID NO: 309145 - DNA, 21 bp, Artificial sequence
  SiRNA target sequence
gaaggtcgagtacgaggaaat

SEQ ID NO: 309146 - DNA, 21 bp, Artificial sequence
  SiRNA target sequence
aaggtcgagtacgaggaaatt

SEQ ID NO: 309147 - DNA, 21 bp, Artificial sequence
  SiRNA target sequence
aggtcgagtacgaggaaattt

SEQ ID NO: 309148 - DNA, 21 bp, Artificial sequence
  SiRNA target sequence
ggtcgagtacgaggaaatttg

SEQ ID NO: 309149 - DNA, 21 bp, Artificial sequence
  SiRNA target sequence
gtcgagtacgaggaaatttga

SEQ ID NO: 309150 - DNA, 21 bp, Artificial sequence
  SiRNA target sequence
tcgagtacgaggaaatttgat

SEQ ID NO: 309151 - DNA, 21 bp, Artificial sequence
  SiRNA target sequence
cgagtacgaggaaatttgatg

SEQ ID NO: 309152 - DNA, 21 bp, Artificial sequence
  SiRNA target sequence
gagtacgaggaaatttgatgg

SEQ ID NO: 309153 - DNA, 21 bp, Artificial sequence
  SiRNA target sequence
agtacgaggaaatttgatggg

SEQ ID NO: 309154 - DNA, 21 bp, Artificial sequence
  SiRNA target sequence
gtacgaggaaatttgatgggc

SEQ ID NO: 309155 - DNA, 21 bp, Artificial sequence
  SiRNA target sequence
tacgaggaaatttgatgggca

SEQ ID NO: 309156 - DNA, 21 bp, Artificial sequence
  SiRNA target sequence
acgaggaaatttgatgggcaa

SEQ ID NO: 309157 - DNA, 21 bp, Artificial sequence
  SiRNA target sequence
cgaggaaatttgatgggcaaa

SEQ ID NO: 309158 - DNA, 21 bp, Artificial sequence
  SiRNA target sequence
gaggaaatttgatgggcaaaa

SEQ ID NO: 309159 - DNA, 21 bp, Artificial sequence
  SiRNA target sequence
aggaaatttgatgggcaaaag

SEQ ID NO: 309160 - DNA, 21 bp, Artificial sequence
  SiRNA target sequence
ggaaatttgatgggcaaaagg

SEQ ID NO: 309161 - DNA, 21 bp, Artificial sequence
  SiRNA target sequence
gaaatttgatgggcaaaaggg

SEQ ID NO: 309162 - DNA, 21 bp, Artificial sequence
  SiRNA target sequence
aaatttgatgggcaaaagggt

SEQ ID NO: 309163 - DNA, 21 bp, Artificial sequence
  SiRNA target sequence
aatttgatgggcaaaagggta

SEQ ID NO: 309164 - DNA, 21 bp, Artificial sequence
  SiRNA target sequence
atttgatgggcaaaagggtag

SEQ ID NO: 309165 - DNA, 21 bp, Artificial sequence
  SiRNA target sequence
tttgatgggcaaaagggtaga

SEQ ID NO: 309166 - DNA, 21 bp, Artificial sequence
  SiRNA target sequence
ttgatgggcaaaagggtagat

SEQ ID NO: 309167 - DNA, 21 bp, Artificial sequence
  SiRNA target sequence
tgatgggcaaaagggtagatt

SEQ ID NO: 309168 - DNA, 21 bp, Artificial sequence
  SiRNA target sequence
gatgggcaaaagggtagattt

SEQ ID NO: 309169 - DNA, 21 bp, Artificial sequence
  SiRNA target sequence
atgggcaaaagggtagatttt

SEQ ID NO: 309170 - DNA, 21 bp, Artificial sequence
  SiRNA target sequence
tgggcaaaagggtagatttta

SEQ ID NO: 309171 - DNA, 21 bp, Artificial sequence
  SiRNA target sequence
gggcaaaagggtagattttag

SEQ ID NO: 309172 - DNA, 21 bp, Artificial sequence
  SiRNA target sequence
ggcaaaagggtagattttagt

SEQ ID NO: 309173 - DNA, 21 bp, Artificial sequence
  SiRNA target sequence
gcaaaagggtagattttagtg

SEQ ID NO: 309174 - DNA, 21 bp, Artificial sequence
  SiRNA target sequence
caaaagggtagattttagtgc

SEQ ID NO: 309175 - DNA, 21 bp, Artificial sequence
  SiRNA target sequence
aaaagggtagattttagtgca

SEQ ID NO: 309176 - DNA, 21 bp, Artificial sequence
  SiRNA target sequence
aaagggtagattttagtgcaa

SEQ ID NO: 309177 - DNA, 21 bp, Artificial sequence
  SiRNA target sequence
aagggtagattttagtgcaag

SEQ ID NO: 309178 - DNA, 21 bp, Artificial sequence
  SiRNA target sequence
agggtagattttagtgcaaga

SEQ ID NO: 309179 - DNA, 21 bp, Artificial sequence
  SiRNA target sequence
gggtagattttagtgcaagat

SEQ ID NO: 309180 - DNA, 21 bp, Artificial sequence
  SiRNA target sequence
ggtagattttagtgcaagatc

SEQ ID NO: 309181 - DNA, 21 bp, Artificial sequence
  SiRNA target sequence
gtagattttagtgcaagatct

SEQ ID NO: 309182 - DNA, 21 bp, Artificial sequence
  SiRNA target sequence
tagattttagtgcaagatctg

SEQ ID NO: 309183 - DNA, 21 bp, Artificial sequence
  SiRNA target sequence
agattttagtgcaagatctgt

SEQ ID NO: 309184 - DNA, 21 bp, Artificial sequence
  SiRNA target sequence
gattttagtgcaagatctgtt

SEQ ID NO: 309185 - DNA, 21 bp, Artificial sequence
  SiRNA target sequence
attttagtgcaagatctgtta

SEQ ID NO: 309186 - DNA, 21 bp, Artificial sequence
  SiRNA target sequence
ttttagtgcaagatctgttat

SEQ ID NO: 309187 - DNA, 21 bp, Artificial sequence
  SiRNA target sequence
tttagtgcaagatctgttatc

SEQ ID NO: 309188 - DNA, 21 bp, Artificial sequence
  SiRNA target sequence
ttagtgcaagatctgttatca

SEQ ID NO: 309189 - DNA, 21 bp, Artificial sequence
  SiRNA target sequence
tagtgcaagatctgttatcac

SEQ ID NO: 309190 - DNA, 21 bp, Artificial sequence
  SiRNA target sequence
agtgcaagatctgttatcaca

SEQ ID NO: 309191 - DNA, 21 bp, Artificial sequence
  SiRNA target sequence
gtgcaagatctgttatcacac

SEQ ID NO: 309192 - DNA, 21 bp, Artificial sequence
  SiRNA target sequence
tgcaagatctgttatcacacc

SEQ ID NO: 309193 - DNA, 21 bp, Artificial sequence
  SiRNA target sequence
gcaagatctgttatcacacca

SEQ ID NO: 309194 - DNA, 21 bp, Artificial sequence
  SiRNA target sequence
caagatctgttatcacaccag

SEQ ID NO: 309195 - DNA, 21 bp, Artificial sequence
  SiRNA target sequence
aagatctgttatcacaccaga

SEQ ID NO: 309196 - DNA, 21 bp, Artificial sequence
  SiRNA target sequence
agatctgttatcacaccagat

SEQ ID NO: 309197 - DNA, 21 bp, Artificial sequence
  SiRNA target sequence
gatctgttatcacaccagatg

SEQ ID NO: 309198 - DNA, 21 bp, Artificial sequence
  SiRNA target sequence
atctgttatcacaccagatgc

SEQ ID NO: 309199 - DNA, 21 bp, Artificial sequence
  SiRNA target sequence
tctgttatcacaccagatgca

SEQ ID NO: 309200 - DNA, 21 bp, Artificial sequence
  SiRNA target sequence
ctgttatcacaccagatgcaa

SEQ ID NO: 309201 - DNA, 21 bp, Artificial sequence
  SiRNA target sequence
tgttatcacaccagatgcaaa

SEQ ID NO: 309202 - DNA, 21 bp, Artificial sequence
  SiRNA target sequence
gttatcacaccagatgcaaat

SEQ ID NO: 309203 - DNA, 21 bp, Artificial sequence
  SiRNA target sequence
ttatcacaccagatgcaaata

SEQ ID NO: 309204 - DNA, 21 bp, Artificial sequence
  SiRNA target sequence
tatcacaccagatgcaaatat

SEQ ID NO: 309205 - DNA, 21 bp, Artificial sequence
  SiRNA target sequence
atcacaccagatgcaaatatt

SEQ ID NO: 309206 - DNA, 21 bp, Artificial sequence
  SiRNA target sequence
tcacaccagatgcaaatattt

SEQ ID NO: 309207 - DNA, 21 bp, Artificial sequence
  SiRNA target sequence
cacaccagatgcaaatatttc

SEQ ID NO: 309208 - DNA, 21 bp, Artificial sequence
  SiRNA target sequence
acaccagatgcaaatatttca

SEQ ID NO: 309209 - DNA, 21 bp, Artificial sequence
  SiRNA target sequence
caccagatgcaaatatttcat

SEQ ID NO: 309210 - DNA, 21 bp, Artificial sequence
  SiRNA target sequence
accagatgcaaatatttcatt

SEQ ID NO: 309211 - DNA, 21 bp, Artificial sequence
  SiRNA target sequence
ccagatgcaaatatttcatta

SEQ ID NO: 309212 - DNA, 21 bp, Artificial sequence
  SiRNA target sequence
cagatgcaaatatttcattaa

SEQ ID NO: 309213 - DNA, 21 bp, Artificial sequence
  SiRNA target sequence
agatgcaaatatttcattaat

SEQ ID NO: 309214 - DNA, 21 bp, Artificial sequence
  SiRNA target sequence
gatgcaaatatttcattaata

SEQ ID NO: 309215 - DNA, 21 bp, Artificial sequence
  SiRNA target sequence
atgcaaatatttcattaatag

SEQ ID NO: 309216 - DNA, 21 bp, Artificial sequence
  SiRNA target sequence
tgcaaatatttcattaataga

SEQ ID NO: 309217 - DNA, 21 bp, Artificial sequence
  SiRNA target sequence
gcaaatatttcattaatagaa

SEQ ID NO: 309218 - DNA, 21 bp, Artificial sequence
  SiRNA target sequence
caaatatttcattaatagaac

SEQ ID NO: 309219 - DNA, 21 bp, Artificial sequence
  SiRNA target sequence
aaatatttcattaatagaact

SEQ ID NO: 309220 - DNA, 21 bp, Artificial sequence
  SiRNA target sequence
aatatttcattaatagaactt

SEQ ID NO: 309221 - DNA, 21 bp, Artificial sequence
  SiRNA target sequence
atatttcattaatagaacttg

SEQ ID NO: 309222 - DNA, 21 bp, Artificial sequence
  SiRNA target sequence
tatttcattaatagaacttgg

SEQ ID NO: 309223 - DNA, 21 bp, Artificial sequence
  SiRNA target sequence
atttcattaatagaacttgga

SEQ ID NO: 309224 - DNA, 21 bp, Artificial sequence
  SiRNA target sequence
tttcattaatagaacttggag

SEQ ID NO: 309225 - DNA, 21 bp, Artificial sequence
  SiRNA target sequence
ttcattaatagaacttggagt

SEQ ID NO: 309226 - DNA, 21 bp, Artificial sequence
  SiRNA target sequence
tcattaatagaacttggagtt

SEQ ID NO: 309227 - DNA, 21 bp, Artificial sequence
  SiRNA target sequence
cattaatagaacttggagttc

SEQ ID NO: 309228 - DNA, 21 bp, Artificial sequence
  SiRNA target sequence
attaatagaacttggagttcc

SEQ ID NO: 309229 - DNA, 21 bp, Artificial sequence
  SiRNA target sequence
ttaatagaacttggagttcca

SEQ ID NO: 309230 - DNA, 21 bp, Artificial sequence
  SiRNA target sequence
taatagaacttggagttccag

SEQ ID NO: 309231 - DNA, 21 bp, Artificial sequence
  SiRNA target sequence
aatagaacttggagttccagt

SEQ ID NO: 309232 - DNA, 21 bp, Artificial sequence
  SiRNA target sequence
atagaacttggagttccagta

SEQ ID NO: 309233 - DNA, 21 bp, Artificial sequence
  SiRNA target sequence
tagaacttggagttccagtag

SEQ ID NO: 309234 - DNA, 21 bp, Artificial sequence
  SiRNA target sequence
agaacttggagttccagtaga

SEQ ID NO: 309235 - DNA, 21 bp, Artificial sequence
  SiRNA target sequence
gaacttggagttccagtagaa

SEQ ID NO: 309236 - DNA, 21 bp, Artificial sequence
  SiRNA target sequence
aacttggagttccagtagaaa

SEQ ID NO: 309237 - DNA, 21 bp, Artificial sequence
  SiRNA target sequence
acttggagttccagtagaaat

SEQ ID NO: 309238 - DNA, 21 bp, Artificial sequence
  SiRNA target sequence
cttggagttccagtagaaatt

SEQ ID NO: 309239 - DNA, 21 bp, Artificial sequence
  SiRNA target sequence
ttggagttccagtagaaattg

SEQ ID NO: 309240 - DNA, 21 bp, Artificial sequence
  SiRNA target sequence
tggagttccagtagaaattgc

SEQ ID NO: 309241 - DNA, 21 bp, Artificial sequence
  SiRNA target sequence
ggagttccagtagaaattgct

SEQ ID NO: 309242 - DNA, 21 bp, Artificial sequence
  SiRNA target sequence
gagttccagtagaaattgcta

SEQ ID NO: 309243 - DNA, 21 bp, Artificial sequence
  SiRNA target sequence
agttccagtagaaattgctaa

SEQ ID NO: 309244 - DNA, 21 bp, Artificial sequence
  SiRNA target sequence
gttccagtagaaattgctaaa

SEQ ID NO: 309245 - DNA, 21 bp, Artificial sequence
  SiRNA target sequence
ttccagtagaaattgctaaaa

SEQ ID NO: 309246 - DNA, 21 bp, Artificial sequence
  SiRNA target sequence
tccagtagaaattgctaaaat

SEQ ID NO: 309247 - DNA, 21 bp, Artificial sequence
  SiRNA target sequence
ccagtagaaattgctaaaatt

SEQ ID NO: 309248 - DNA, 21 bp, Artificial sequence
  SiRNA target sequence
cagtagaaattgctaaaattc

SEQ ID NO: 309249 - DNA, 21 bp, Artificial sequence
  SiRNA target sequence
agtagaaattgctaaaattca

SEQ ID NO: 309250 - DNA, 21 bp, Artificial sequence
  SiRNA target sequence
  misc_feature (21)..(21): n is a, c, g, or t
gtagaaattgctaaaattcan

SEQ ID NO: 309251 - DNA, 21 bp, Artificial sequence
  SiRNA target sequence
  misc_feature (20)..(20): n is a, c, g, or t
tagaaattgctaaaattcana

SEQ ID NO: 309252 - DNA, 21 bp, Artificial sequence
  SiRNA target sequence
  misc_feature (19)..(19): n is a, c, g, or t
agaaattgctaaaattcanac

SEQ ID NO: 309253 - DNA, 21 bp, Artificial sequence
  SiRNA target sequence
  misc_feature (18)..(18): n is a, c, g, or t
gaaattgctaaaattcanaca

SEQ ID NO: 309254 - DNA, 21 bp, Artificial sequence
  SiRNA target sequence
  misc_feature (17)..(17): n is a, c, g, or t
aaattgctaaaattcanacat

SEQ ID NO: 309255 - DNA, 21 bp, Artificial sequence
  SiRNA target sequence
  misc_feature (16)..(16): n is a, c, g, or t
aattgctaaaattcanacatt

SEQ ID NO: 309256 - DNA, 21 bp, Artificial sequence
  SiRNA target sequence
  misc_feature (15)..(15): n is a, c, g, or t
attgctaaaattcanacattt

SEQ ID NO: 309257 - DNA, 21 bp, Artificial sequence
  SiRNA target sequence
  misc_feature (14)..(14): n is a, c, g, or t
ttgctaaaattcanacatttc

SEQ ID NO: 309258 - DNA, 21 bp, Artificial sequence
  SiRNA target sequence
  misc_feature (13)..(13): n is a, c, g, or t
tgctaaaattcanacatttcc

SEQ ID NO: 309259 - DNA, 21 bp, Artificial sequence
  SiRNA target sequence
  misc_feature (12)..(12): n is a, c, g, or t
gctaaaattcanacatttcct

SEQ ID NO: 309260 - DNA, 21 bp, Artificial sequence
  SiRNA target sequence
  misc_feature (11)..(11): n is a, c, g, or t
ctaaaattcanacatttcctg

SEQ ID NO: 309261 - DNA, 21 bp, Artificial sequence
  SiRNA target sequence
  misc_feature (10)..(10): n is a, c, g, or t
taaaattcanacatttcctga

SEQ ID NO: 309262 - DNA, 21 bp, Artificial sequence
  SiRNA target sequence
  misc_feature (9)..(9): n is a, c, g, or t
aaaattcanacatttcctgaa

SEQ ID NO: 309263 - DNA, 21 bp, Artificial sequence
  SiRNA target sequence
  misc_feature (8)..(8): n is a, c, g, or t
aaattcanacatttcctgaag

SEQ ID NO: 309264 - DNA, 21 bp, Artificial sequence
  SiRNA target sequence
  misc_feature (7)..(7): n is a, c, g, or t
aattcanacatttcctgaagc

SEQ ID NO: 309265 - DNA, 21 bp, Artificial sequence
  SiRNA target sequence
  misc_feature (6)..(6): n is a, c, g, or t
attcanacatttcctgaagca

SEQ ID NO: 309266 - DNA, 21 bp, Artificial sequence
  SiRNA target sequence
  misc_feature (5)..(5): n is a, c, g, or t
ttcanacatttcctgaagcaa

SEQ ID NO: 309267 - DNA, 21 bp, Artificial sequence
  SiRNA target sequence
  misc_feature (4)..(4): n is a, c, g, or t
tcanacatttcctgaagcaat

SEQ ID NO: 309268 - DNA, 21 bp, Artificial sequence
  SiRNA target sequence
  misc_feature (3)..(3): n is a, c, g, or t
canacatttcctgaagcaatc

SEQ ID NO: 309269 - DNA, 21 bp, Artificial sequence
  SiRNA target sequence
  misc_feature (2)..(2): n is a, c, g, or t
anacatttcctgaagcaatca

SEQ ID NO: 309270 - DNA, 21 bp, Artificial sequence
  SiRNA target sequence
  misc_feature (1)..(1): n is a, c, g, or t
nacatttcctgaagcaatcac

SEQ ID NO: 309271 - DNA, 21 bp, Artificial sequence
  SiRNA target sequence
acatttcctgaagcaatcacc

SEQ ID NO: 309272 - DNA, 21 bp, Artificial sequence
  SiRNA target sequence
catttcctgaagcaatcacct

SEQ ID NO: 309273 - DNA, 21 bp, Artificial sequence
  SiRNA target sequence
atttcctgaagcaatcacctc

SEQ ID NO: 309274 - DNA, 21 bp, Artificial sequence
  SiRNA target sequence
tttcctgaagcaatcacctca

SEQ ID NO: 309275 - DNA, 21 bp, Artificial sequence
  SiRNA target sequence
ttcctgaagcaatcacctcat

SEQ ID NO: 309276 - DNA, 21 bp, Artificial sequence
  SiRNA target sequence
tcctgaagcaatcacctcata

SEQ ID NO: 309277 - DNA, 21 bp, Artificial sequence
  SiRNA target sequence
cctgaagcaatcacctcatac

SEQ ID NO: 309278 - DNA, 21 bp, Artificial sequence
  SiRNA target sequence
ctgaagcaatcacctcataca

SEQ ID NO: 309279 - DNA, 21 bp, Artificial sequence
  SiRNA target sequence
tgaagcaatcacctcatacaa

SEQ ID NO: 309280 - DNA, 21 bp, Artificial sequence
  SiRNA target sequence
gaagcaatcacctcatacaat

SEQ ID NO: 309281 - DNA, 21 bp, Artificial sequence
  SiRNA target sequence
aagcaatcacctcatacaata

SEQ ID NO: 309282 - DNA, 21 bp, Artificial sequence
  SiRNA target sequence
agcaatcacctcatacaatat

SEQ ID NO: 309283 - DNA, 21 bp, Artificial sequence
  SiRNA target sequence
gcaatcacctcatacaatatt

SEQ ID NO: 309284 - DNA, 21 bp, Artificial sequence
  SiRNA target sequence
caatcacctcatacaatattc

SEQ ID NO: 309285 - DNA, 21 bp, Artificial sequence
  SiRNA target sequence
aatcacctcatacaatattca

SEQ ID NO: 309286 - DNA, 21 bp, Artificial sequence
  SiRNA target sequence
atcacctcatacaatattcac

SEQ ID NO: 309287 - DNA, 21 bp, Artificial sequence
  SiRNA target sequence
tcacctcatacaatattcaca

SEQ ID NO: 309288 - DNA, 21 bp, Artificial sequence
  SiRNA target sequence
cacctcatacaatattcacaa

SEQ ID NO: 309289 - DNA, 21 bp, Artificial sequence
  SiRNA target sequence
acctcatacaatattcacaag

SEQ ID NO: 309290 - DNA, 21 bp, Artificial sequence
  SiRNA target sequence
cctcatacaatattcacaagt

SEQ ID NO: 309291 - DNA, 21 bp, Artificial sequence
  SiRNA target sequence
ctcatacaatattcacaagtt

SEQ ID NO: 309292 - DNA, 21 bp, Artificial sequence
  SiRNA target sequence
tcatacaatattcacaagttg

SEQ ID NO: 309293 - DNA, 21 bp, Artificial sequence
  SiRNA target sequence
catacaatattcacaagttgt

SEQ ID NO: 309294 - DNA, 21 bp, Artificial sequence
  SiRNA target sequence
atacaatattcacaagttgtc

SEQ ID NO: 309295 - DNA, 21 bp, Artificial sequence
  SiRNA target sequence
tacaatattcacaagttgtct

SEQ ID NO: 309296 - DNA, 21 bp, Artificial sequence
  SiRNA target sequence
acaatattcacaagttgtctg

SEQ ID NO: 309297 - DNA, 21 bp, Artificial sequence
  SiRNA target sequence
caatattcacaagttgtctga

SEQ ID NO: 309298 - DNA, 21 bp, Artificial sequence
  SiRNA target sequence
aatattcacaagttgtctgaa

SEQ ID NO: 309299 - DNA, 21 bp, Artificial sequence
  SiRNA target sequence
atattcacaagttgtctgaac

SEQ ID NO: 309300 - DNA, 21 bp, Artificial sequence
  SiRNA target sequence
tattcacaagttgtctgaact

SEQ ID NO: 309301 - DNA, 21 bp, Artificial sequence
  SiRNA target sequence
attcacaagttgtctgaactt

SEQ ID NO: 309302 - DNA, 21 bp, Artificial sequence
  SiRNA target sequence
ttcacaagttgtctgaacttg

SEQ ID NO: 309303 - DNA, 21 bp, Artificial sequence
  SiRNA target sequence
tcacaagttgtctgaacttgt

SEQ ID NO: 309304 - DNA, 21 bp, Artificial sequence
  SiRNA target sequence
cacaagttgtctgaacttgta

SEQ ID NO: 309305 - DNA, 21 bp, Artificial sequence
  SiRNA target sequence
acaagttgtctgaacttgtat

SEQ ID NO: 309306 - DNA, 21 bp, Artificial sequence
  SiRNA target sequence
caagttgtctgaacttgtatc

SEQ ID NO: 309307 - DNA, 21 bp, Artificial sequence
  SiRNA target sequence
aagttgtctgaacttgtatca

SEQ ID NO: 309308 - DNA, 21 bp, Artificial sequence
  SiRNA target sequence
agttgtctgaacttgtatcaa

SEQ ID NO: 309309 - DNA, 21 bp, Artificial sequence
  SiRNA target sequence
gttgtctgaacttgtatcaaa

SEQ ID NO: 309310 - DNA, 21 bp, Artificial sequence
  SiRNA target sequence
ttgtctgaacttgtatcaaat

SEQ ID NO: 309311 - DNA, 21 bp, Artificial sequence
  SiRNA target sequence
tgtctgaacttgtatcaaatg

SEQ ID NO: 309312 - DNA, 21 bp, Artificial sequence
  SiRNA target sequence
gtctgaacttgtatcaaatgg

SEQ ID NO: 309313 - DNA, 21 bp, Artificial sequence
  SiRNA target sequence
tctgaacttgtatcaaatgga

SEQ ID NO: 309314 - DNA, 21 bp, Artificial sequence
  SiRNA target sequence
ctgaacttgtatcaaatggac

SEQ ID NO: 309315 - DNA, 21 bp, Artificial sequence
  SiRNA target sequence
tgaacttgtatcaaatggacc

SEQ ID NO: 309316 - DNA, 21 bp, Artificial sequence
  SiRNA target sequence
gaacttgtatcaaatggacca

SEQ ID NO: 309317 - DNA, 21 bp, Artificial sequence
  SiRNA target sequence
aacttgtatcaaatggaccaa

SEQ ID NO: 309318 - DNA, 21 bp, Artificial sequence
  SiRNA target sequence
acttgtatcaaatggaccaaa

SEQ ID NO: 309319 - DNA, 21 bp, Artificial sequence
  SiRNA target sequence
cttgtatcaaatggaccaaac

SEQ ID NO: 309320 - DNA, 21 bp, Artificial sequence
  SiRNA target sequence
ttgtatcaaatggaccaaacg

SEQ ID NO: 309321 - DNA, 21 bp, Artificial sequence
  SiRNA target sequence
tgtatcaaatggaccaaacga

SEQ ID NO: 309322 - DNA, 21 bp, Artificial sequence
  SiRNA target sequence
gtatcaaatggaccaaacgaa

SEQ ID NO: 309323 - DNA, 21 bp, Artificial sequence
  SiRNA target sequence
tatcaaatggaccaaacgaat

SEQ ID NO: 309324 - DNA, 21 bp, Artificial sequence
  SiRNA target sequence
atcaaatggaccaaacgaata

SEQ ID NO: 309325 - DNA, 21 bp, Artificial sequence
  SiRNA target sequence
tcaaatggaccaaacgaatat

SEQ ID NO: 309326 - DNA, 21 bp, Artificial sequence
  SiRNA target sequence
caaatggaccaaacgaatatc

SEQ ID NO: 309327 - DNA, 21 bp, Artificial sequence
  SiRNA target sequence
aaatggaccaaacgaatatcc

SEQ ID NO: 309328 - DNA, 21 bp, Artificial sequence
  SiRNA target sequence
aatggaccaaacgaatatcct

SEQ ID NO: 309329 - DNA, 21 bp, Artificial sequence
  SiRNA target sequence
atggaccaaacgaatatcctg

SEQ ID NO: 309330 - DNA, 21 bp, Artificial sequence
  SiRNA target sequence
tggaccaaacgaatatcctgg

SEQ ID NO: 309331 - DNA, 21 bp, Artificial sequence
  SiRNA target sequence
ggaccaaacgaatatcctggt

SEQ ID NO: 309332 - DNA, 21 bp, Artificial sequence
  SiRNA target sequence
gaccaaacgaatatcctggtg

SEQ ID NO: 309333 - DNA, 21 bp, Artificial sequence
  SiRNA target sequence
accaaacgaatatcctggtgc

SEQ ID NO: 309334 - DNA, 21 bp, Artificial sequence
  SiRNA target sequence
ccaaacgaatatcctggtgca

SEQ ID NO: 309335 - DNA, 21 bp, Artificial sequence
  SiRNA target sequence
caaacgaatatcctggtgcaa

SEQ ID NO: 309336 - DNA, 21 bp, Artificial sequence
  SiRNA target sequence
aaacgaatatcctggtgcaaa

SEQ ID NO: 309337 - DNA, 21 bp, Artificial sequence
  SiRNA target sequence
aacgaatatcctggtgcaaat

SEQ ID NO: 309338 - DNA, 21 bp, Artificial sequence
  SiRNA target sequence
acgaatatcctggtgcaaatt

SEQ ID NO: 309339 - DNA, 21 bp, Artificial sequence
  SiRNA target sequence
cgaatatcctggtgcaaatta

SEQ ID NO: 309340 - DNA, 21 bp, Artificial sequence
  SiRNA target sequence
gaatatcctggtgcaaattat

SEQ ID NO: 309341 - DNA, 21 bp, Artificial sequence
  SiRNA target sequence
aatatcctggtgcaaattatg

SEQ ID NO: 309342 - DNA, 21 bp, Artificial sequence
  SiRNA target sequence
atatcctggtgcaaattatgt

SEQ ID NO: 309343 - DNA, 21 bp, Artificial sequence
  SiRNA target sequence
tatcctggtgcaaattatgtt

SEQ ID NO: 309344 - DNA, 21 bp, Artificial sequence
  SiRNA target sequence
atcctggtgcaaattatgtta

SEQ ID NO: 309345 - DNA, 21 bp, Artificial sequence
  SiRNA target sequence
tcctggtgcaaattatgttat

SEQ ID NO: 309346 - DNA, 21 bp, Artificial sequence
  SiRNA target sequence
cctggtgcaaattatgttata

SEQ ID NO: 309347 - DNA, 21 bp, Artificial sequence
  SiRNA target sequence
ctggtgcaaattatgttataa

SEQ ID NO: 309348 - DNA, 21 bp, Artificial sequence
  SiRNA target sequence
tggtgcaaattatgttataag

SEQ ID NO: 309349 - DNA, 21 bp, Artificial sequence
  SiRNA target sequence
ggtgcaaattatgttataaga

SEQ ID NO: 309350 - DNA, 21 bp, Artificial sequence
  SiRNA target sequence
gtgcaaattatgttataagat

SEQ ID NO: 309351 - DNA, 21 bp, Artificial sequence
  SiRNA target sequence
tgcaaattatgttataagatc

SEQ ID NO: 309352 - DNA, 21 bp, Artificial sequence
  SiRNA target sequence
gcaaattatgttataagatct

SEQ ID NO: 309353 - DNA, 21 bp, Artificial sequence
  SiRNA target sequence
caaattatgttataagatctg

SEQ ID NO: 309354 - DNA, 21 bp, Artificial sequence
  SiRNA target sequence
aaattatgttataagatctga

SEQ ID NO: 309355 - DNA, 21 bp, Artificial sequence
  SiRNA target sequence
aattatgttataagatctgat

SEQ ID NO: 309356 - DNA, 21 bp, Artificial sequence
  SiRNA target sequence
attatgttataagatctgatg

SEQ ID NO: 309357 - DNA, 21 bp, Artificial sequence
  SiRNA target sequence
ttatgttataagatctgatgg

SEQ ID NO: 309358 - DNA, 21 bp, Artificial sequence
  SiRNA target sequence
tatgttataagatctgatggt

SEQ ID NO: 309359 - DNA, 21 bp, Artificial sequence
  SiRNA target sequence
atgttataagatctgatggtc

SEQ ID NO: 309360 - DNA, 21 bp, Artificial sequence
  SiRNA target sequence
tgttataagatctgatggtca

SEQ ID NO: 309361 - DNA, 21 bp, Artificial sequence
  SiRNA target sequence
gttataagatctgatggtcaa

SEQ ID NO: 309362 - DNA, 21 bp, Artificial sequence
  SiRNA target sequence
ttataagatctgatggtcaaa

SEQ ID NO: 309363 - DNA, 21 bp, Artificial sequence
  SiRNA target sequence
tataagatctgatggtcaaag

SEQ ID NO: 309364 - DNA, 21 bp, Artificial sequence
  SiRNA target sequence
ataagatctgatggtcaaaga

SEQ ID NO: 309365 - DNA, 21 bp, Artificial sequence
  SiRNA target sequence
taagatctgatggtcaaagaa

SEQ ID NO: 309366 - DNA, 21 bp, Artificial sequence
  SiRNA target sequence
aagatctgatggtcaaagaat

SEQ ID NO: 309367 - DNA, 21 bp, Artificial sequence
  SiRNA target sequence
agatctgatggtcaaagaatt

SEQ ID NO: 309368 - DNA, 21 bp, Artificial sequence
  SiRNA target sequence
gatctgatggtcaaagaattg

SEQ ID NO: 309369 - DNA, 21 bp, Artificial sequence
  SiRNA target sequence
atctgatggtcaaagaattga

SEQ ID NO: 309370 - DNA, 21 bp, Artificial sequence
  SiRNA target sequence
tctgatggtcaaagaattgat

SEQ ID NO: 309371 - DNA, 21 bp, Artificial sequence
  SiRNA target sequence
ctgatggtcaaagaattgatc

SEQ ID NO: 309372 - DNA, 21 bp, Artificial sequence
  SiRNA target sequence
tgatggtcaaagaattgatct

SEQ ID NO: 309373 - DNA, 21 bp, Artificial sequence
  SiRNA target sequence
gatggtcaaagaattgatcta

SEQ ID NO: 309374 - DNA, 21 bp, Artificial sequence
  SiRNA target sequence
atggtcaaagaattgatctaa

SEQ ID NO: 309375 - DNA, 21 bp, Artificial sequence
  SiRNA target sequence
tggtcaaagaattgatctaaa

SEQ ID NO: 309376 - DNA, 21 bp, Artificial sequence
  SiRNA target sequence
ggtcaaagaattgatctaaaa

SEQ ID NO: 309377 - DNA, 21 bp, Artificial sequence
  SiRNA target sequence
gtcaaagaattgatctaaaat

SEQ ID NO: 309378 - DNA, 21 bp, Artificial sequence
  SiRNA target sequence
tcaaagaattgatctaaaatt

SEQ ID NO: 309379 - DNA, 21 bp, Artificial sequence
  SiRNA target sequence
caaagaattgatctaaaattt

SEQ ID NO: 309380 - DNA, 21 bp, Artificial sequence
  SiRNA target sequence
aaagaattgatctaaaattta

SEQ ID NO: 309381 - DNA, 21 bp, Artificial sequence
  SiRNA target sequence
aagaattgatctaaaatttaa

SEQ ID NO: 309382 - DNA, 21 bp, Artificial sequence
  SiRNA target sequence
agaattgatctaaaatttaat

SEQ ID NO: 309383 - DNA, 21 bp, Artificial sequence
  SiRNA target sequence
gaattgatctaaaatttaata

SEQ ID NO: 309384 - DNA, 21 bp, Artificial sequence
  SiRNA target sequence
aattgatctaaaatttaatag

SEQ ID NO: 309385 - DNA, 21 bp, Artificial sequence
  SiRNA target sequence
attgatctaaaatttaataga

SEQ ID NO: 309386 - DNA, 21 bp, Artificial sequence
  SiRNA target sequence
ttgatctaaaatttaatagaa

SEQ ID NO: 309387 - DNA, 21 bp, Artificial sequence
  SiRNA target sequence
tgatctaaaatttaatagaag

SEQ ID NO: 309388 - DNA, 21 bp, Artificial sequence
  SiRNA target sequence
gatctaaaatttaatagaagt

SEQ ID NO: 309389 - DNA, 21 bp, Artificial sequence
  SiRNA target sequence
atctaaaatttaatagaagtg

SEQ ID NO: 309390 - DNA, 21 bp, Artificial sequence
  SiRNA target sequence
tctaaaatttaatagaagtga

SEQ ID NO: 309391 - DNA, 21 bp, Artificial sequence
  SiRNA target sequence
ctaaaatttaatagaagtgat

SEQ ID NO: 309392 - DNA, 21 bp, Artificial sequence
  SiRNA target sequence
taaaatttaatagaagtgata

SEQ ID NO: 309393 - DNA, 21 bp, Artificial sequence
  SiRNA target sequence
aaaatttaatagaagtgatat

SEQ ID NO: 309394 - DNA, 21 bp, Artificial sequence
  SiRNA target sequence
aaatttaatagaagtgatatt

SEQ ID NO: 309395 - DNA, 21 bp, Artificial sequence
  SiRNA target sequence
aatttaatagaagtgatatta

SEQ ID NO: 309396 - DNA, 21 bp, Artificial sequence
  SiRNA target sequence
atttaatagaagtgatattaa

SEQ ID NO: 309397 - DNA, 21 bp, Artificial sequence
  SiRNA target sequence
tttaatagaagtgatattaaa

SEQ ID NO: 309398 - DNA, 21 bp, Artificial sequence
  SiRNA target sequence
ttaatagaagtgatattaaat

SEQ ID NO: 309399 - DNA, 21 bp, Artificial sequence
  SiRNA target sequence
taatagaagtgatattaaatt

SEQ ID NO: 309400 - DNA, 21 bp, Artificial sequence
  SiRNA target sequence
aatagaagtgatattaaatta

SEQ ID NO: 309401 - DNA, 21 bp, Artificial sequence
  SiRNA target sequence
atagaagtgatattaaattag

SEQ ID NO: 309402 - DNA, 21 bp, Artificial sequence
  SiRNA target sequence
tagaagtgatattaaattaga

SEQ ID NO: 309403 - DNA, 21 bp, Artificial sequence
  SiRNA target sequence
agaagtgatattaaattagaa

SEQ ID NO: 309404 - DNA, 21 bp, Artificial sequence
  SiRNA target sequence
gaagtgatattaaattagaag

SEQ ID NO: 309405 - DNA, 21 bp, Artificial sequence
  SiRNA target sequence
aagtgatattaaattagaaga

SEQ ID NO: 309406 - DNA, 21 bp, Artificial sequence
  SiRNA target sequence
agtgatattaaattagaagag

SEQ ID NO: 309407 - DNA, 21 bp, Artificial sequence
  SiRNA target sequence
gtgatattaaattagaagagg

SEQ ID NO: 309408 - DNA, 21 bp, Artificial sequence
  SiRNA target sequence
tgatattaaattagaagaggg

SEQ ID NO: 309409 - DNA, 21 bp, Artificial sequence
  SiRNA target sequence
gatattaaattagaagaggga

SEQ ID NO: 309410 - DNA, 21 bp, Artificial sequence
  SiRNA target sequence
atattaaattagaagagggat

SEQ ID NO: 309411 - DNA, 21 bp, Artificial sequence
  SiRNA target sequence
tattaaattagaagagggata

SEQ ID NO: 309412 - DNA, 21 bp, Artificial sequence
  SiRNA target sequence
attaaattagaagagggatat

SEQ ID NO: 309413 - DNA, 21 bp, Artificial sequence
  SiRNA target sequence
ttaaattagaagagggatata

SEQ ID NO: 309414 - DNA, 21 bp, Artificial sequence
  SiRNA target sequence
taaattagaagagggatatat

SEQ ID NO: 309415 - DNA, 21 bp, Artificial sequence
  SiRNA target sequence
aaattagaagagggatatatt

SEQ ID NO: 309416 - DNA, 21 bp, Artificial sequence
  SiRNA target sequence
aattagaagagggatatattg

SEQ ID NO: 309417 - DNA, 21 bp, Artificial sequence
  SiRNA target sequence
attagaagagggatatattgt

SEQ ID NO: 309418 - DNA, 21 bp, Artificial sequence
  SiRNA target sequence
ttagaagagggatatattgtc

SEQ ID NO: 309419 - DNA, 21 bp, Artificial sequence
  SiRNA target sequence
tagaagagggatatattgtcg

SEQ ID NO: 309420 - DNA, 21 bp, Artificial sequence
  SiRNA target sequence
agaagagggatatattgtcga

SEQ ID NO: 309421 - DNA, 21 bp, Artificial sequence
  SiRNA target sequence
gaagagggatatattgtcgaa

SEQ ID NO: 309422 - DNA, 21 bp, Artificial sequence
  SiRNA target sequence
aagagggatatattgtcgaaa

SEQ ID NO: 309423 - DNA, 21 bp, Artificial sequence
  SiRNA target sequence
agagggatatattgtcgaaag

SEQ ID NO: 309424 - DNA, 21 bp, Artificial sequence
  SiRNA target sequence
gagggatatattgtcgaaaga

SEQ ID NO: 309425 - DNA, 21 bp, Artificial sequence
  SiRNA target sequence
agggatatattgtcgaaagac

SEQ ID NO: 309426 - DNA, 21 bp, Artificial sequence
  SiRNA target sequence
gggatatattgtcgaaagaca

SEQ ID NO: 309427 - DNA, 21 bp, Artificial sequence
  SiRNA target sequence
ggatatattgtcgaaagacat

SEQ ID NO: 309428 - DNA, 21 bp, Artificial sequence
  SiRNA target sequence
gatatattgtcgaaagacata

SEQ ID NO: 309429 - DNA, 21 bp, Artificial sequence
  SiRNA target sequence
atatattgtcgaaagacatat

SEQ ID NO: 309430 - DNA, 21 bp, Artificial sequence
  SiRNA target sequence
tatattgtcgaaagacatatg

SEQ ID NO: 309431 - DNA, 21 bp, Artificial sequence
  SiRNA target sequence
atattgtcgaaagacatatgc

SEQ ID NO: 309432 - DNA, 21 bp, Artificial sequence
  SiRNA target sequence
tattgtcgaaagacatatgca

SEQ ID NO: 309433 - DNA, 21 bp, Artificial sequence
  SiRNA target sequence
attgtcgaaagacatatgcaa

SEQ ID NO: 309434 - DNA, 21 bp, Artificial sequence
  SiRNA target sequence
ttgtcgaaagacatatgcaaa

SEQ ID NO: 309435 - DNA, 21 bp, Artificial sequence
  SiRNA target sequence
tgtcgaaagacatatgcaaaa

SEQ ID NO: 309436 - DNA, 21 bp, Artificial sequence
  SiRNA target sequence
gtcgaaagacatatgcaaaat

SEQ ID NO: 309437 - DNA, 21 bp, Artificial sequence
  SiRNA target sequence
tcgaaagacatatgcaaaatg

SEQ ID NO: 309438 - DNA, 21 bp, Artificial sequence
  SiRNA target sequence
cgaaagacatatgcaaaatgg

SEQ ID NO: 309439 - DNA, 21 bp, Artificial sequence
  SiRNA target sequence
gaaagacatatgcaaaatggg

SEQ ID NO: 309440 - DNA, 21 bp, Artificial sequence
  SiRNA target sequence
aaagacatatgcaaaatgggg

SEQ ID NO: 309441 - DNA, 21 bp, Artificial sequence
  SiRNA target sequence
aagacatatgcaaaatgggga

SEQ ID NO: 309442 - DNA, 21 bp, Artificial sequence
  SiRNA target sequence
  misc_feature (21)..(21): n is a, c, g, or t
agacatatgcaaaatggggan

SEQ ID NO: 309443 - DNA, 21 bp, Artificial sequence
  SiRNA target sequence
  misc_feature (20)..(20): n is a, c, g, or t
gacatatgcaaaatggggana

SEQ ID NO: 309444 - DNA, 21 bp, Artificial sequence
  SiRNA target sequence
  misc_feature (19)..(19): n is a, c, g, or t
acatatgcaaaatgggganat

SEQ ID NO: 309445 - DNA, 21 bp, Artificial sequence
  SiRNA target sequence
  misc_feature (18)..(18): n is a, c, g, or t
catatgcaaaatgggganata

SEQ ID NO: 309446 - DNA, 21 bp, Artificial sequence
  SiRNA target sequence
  misc_feature (17)..(17): n is a, c, g, or t
atatgcaaaatgggganatag

SEQ ID NO: 309447 - DNA, 21 bp, Artificial sequence
  SiRNA target sequence
  misc_feature (16)..(16): n is a, c, g, or t
tatgcaaaatgggganatagt

SEQ ID NO: 309448 - DNA, 21 bp, Artificial sequence
  SiRNA target sequence
  misc_feature (15)..(15): n is a, c, g, or t
  misc_feature (21)..(21): n is a, c, g, or t
atgcaaaatgggganatagtn

SEQ ID NO: 309449 - DNA, 21 bp, Artificial sequence
  SiRNA target sequence
  misc_feature (14)..(14): n is a, c, g, or t
  misc_feature (20)..(21): n is a, c, g, or t
tgcaaaatgggganatagtnn

SEQ ID NO: 309450 - DNA, 21 bp, Artificial sequence
  SiRNA target sequence
  misc_feature (13)..(13): n is a, c, g, or t
  misc_feature (19)..(20): n is a, c, g, or t
gcaaaatgggganatagtnnt

SEQ ID NO: 309451 - DNA, 21 bp, Artificial sequence
  SiRNA target sequence
  misc_feature (12)..(12): n is a, c, g, or t
  misc_feature (18)..(19): n is a, c, g, or t
caaaatgggganatagtnnta

SEQ ID NO: 309452 - DNA, 21 bp, Artificial sequence
  SiRNA target sequence
  misc_feature (11)..(11): n is a, c, g, or t
  misc_feature (17)..(18): n is a, c, g, or t
aaaatgggganatagtnntat

SEQ ID NO: 309453 - DNA, 21 bp, Artificial sequence
  SiRNA target sequence
  misc_feature (10)..(10): n is a, c, g, or t
  misc_feature (16)..(17): n is a, c, g, or t
aaatgggganatagtnntatt

SEQ ID NO: 309454 - DNA, 21 bp, Artificial sequence
  SiRNA target sequence
  misc_feature (9)..(9): n is a, c, g, or t
  misc_feature (15)..(16): n is a, c, g, or t
aatgggganatagtnntattt

SEQ ID NO: 309455 - DNA, 21 bp, Artificial sequence
  SiRNA target sequence
  misc_feature (8)..(8): n is a, c, g, or t
  misc_feature (14)..(15): n is a, c, g, or t
atgggganatagtnntattta

SEQ ID NO: 309456 - DNA, 21 bp, Artificial sequence
  SiRNA target sequence
  misc_feature (7)..(7): n is a, c, g, or t
  misc_feature (13)..(14): n is a, c, g, or t
tgggganatagtnntatttaa

SEQ ID NO: 309457 - DNA, 21 bp, Artificial sequence
  SiRNA target sequence
  misc_feature (6)..(6): n is a, c, g, or t
  misc_feature (12)..(13): n is a, c, g, or t
gggganatagtnntatttaat

SEQ ID NO: 309458 - DNA, 21 bp, Artificial sequence
  SiRNA target sequence
  misc_feature (5)..(5): n is a, c, g, or t
  misc_feature (11)..(12): n is a, c, g, or t
ggganatagtnntatttaata

SEQ ID NO: 309459 - DNA, 21 bp, Artificial sequence
  SiRNA target sequence
  misc_feature (4)..(4): n is a, c, g, or t
  misc_feature (10)..(11): n is a, c, g, or t
gganatagtnntatttaatag

SEQ ID NO: 309460 - DNA, 21 bp, Artificial sequence
  SiRNA target sequence
  misc_feature (3)..(3): n is a, c, g, or t
  misc_feature (9)..(10): n is a, c, g, or t
ganatagtnntatttaataga

SEQ ID NO: 309461 - DNA, 21 bp, Artificial sequence
  SiRNA target sequence
  misc_feature (2)..(2): n is a, c, g, or t
  misc_feature (8)..(9): n is a, c, g, or t
anatagtnntatttaatagac

SEQ ID NO: 309462 - DNA, 21 bp, Artificial sequence
  SiRNA target sequence
  misc_feature (1)..(1): n is a, c, g, or t
  misc_feature (7)..(8): n is a, c, g, or t
natagtnntatttaatagaca

SEQ ID NO: 309463 - DNA, 21 bp, Artificial sequence
  SiRNA target sequence
  misc_feature (6)..(7): n is a, c, g, or t
atagtnntatttaatagacaa

SEQ ID NO: 309464 - DNA, 21 bp, Artificial sequence
  SiRNA target sequence
  misc_feature (5)..(6): n is a, c, g, or t
tagtnntatttaatagacaac

SEQ ID NO: 309465 - DNA, 21 bp, Artificial sequence
  SiRNA target sequence
  misc_feature (4)..(5): n is a, c, g, or t
agtnntatttaatagacaacc

SEQ ID NO: 309466 - DNA, 21 bp, Artificial sequence
  SiRNA target sequence
  misc_feature (3)..(4): n is a, c, g, or t
gtnntatttaatagacaacct

SEQ ID NO: 309467 - DNA, 21 bp, Artificial sequence
  SiRNA target sequence
  misc_feature (2)..(3): n is a, c, g, or t
tnntatttaatagacaacctt

SEQ ID NO: 309468 - DNA, 21 bp, Artificial sequence
  SiRNA target sequence
  misc_feature (1)..(2): n is a, c, g, or t
nntatttaatagacaaccttc

SEQ ID NO: 309469 - DNA, 21 bp, Artificial sequence
  SiRNA target sequence
  misc_feature (1)..(1): n is a, c, g, or t
ntatttaatagacaaccttca

SEQ ID NO: 309470 - DNA, 21 bp, Artificial sequence
  SiRNA target sequence
tatttaatagacaaccttcat

SEQ ID NO: 309471 - DNA, 21 bp, Artificial sequence
  SiRNA target sequence
atttaatagacaaccttcatt

SEQ ID NO: 309472 - DNA, 21 bp, Artificial sequence
  SiRNA target sequence
tttaatagacaaccttcatta

SEQ ID NO: 309473 - DNA, 21 bp, Artificial sequence
  SiRNA target sequence
ttaatagacaaccttcattac

SEQ ID NO: 309474 - DNA, 21 bp, Artificial sequence
  SiRNA target sequence
taatagacaaccttcattaca

SEQ ID NO: 309475 - DNA, 21 bp, Artificial sequence
  SiRNA target sequence
aatagacaaccttcattacat

SEQ ID NO: 309476 - DNA, 21 bp, Artificial sequence
  SiRNA target sequence
atagacaaccttcattacata

SEQ ID NO: 309477 - DNA, 21 bp, Artificial sequence
  SiRNA target sequence
tagacaaccttcattacataa

SEQ ID NO: 309478 - DNA, 21 bp, Artificial sequence
  SiRNA target sequence
agacaaccttcattacataaa

SEQ ID NO: 309479 - DNA, 21 bp, Artificial sequence
  SiRNA target sequence
gacaaccttcattacataaaa

SEQ ID NO: 309480 - DNA, 21 bp, Artificial sequence
  SiRNA target sequence
acaaccttcattacataaaat

SEQ ID NO: 309481 - DNA, 21 bp, Artificial sequence
  SiRNA target sequence
caaccttcattacataaaatg

SEQ ID NO: 309482 - DNA, 21 bp, Artificial sequence
  SiRNA target sequence
aaccttcattacataaaatgt

SEQ ID NO: 309483 - DNA, 21 bp, Artificial sequence
  SiRNA target sequence
accttcattacataaaatgtc

SEQ ID NO: 309484 - DNA, 21 bp, Artificial sequence
  SiRNA target sequence
ccttcattacataaaatgtct

SEQ ID NO: 309485 - DNA, 21 bp, Artificial sequence
  SiRNA target sequence
cttcattacataaaatgtcta

SEQ ID NO: 309486 - DNA, 21 bp, Artificial sequence
  SiRNA target sequence
ttcattacataaaatgtctat

SEQ ID NO: 309487 - DNA, 21 bp, Artificial sequence
  SiRNA target sequence
tcattacataaaatgtctatg

SEQ ID NO: 309488 - DNA, 21 bp, Artificial sequence
  SiRNA target sequence
cattacataaaatgtctatga

SEQ ID NO: 309489 - DNA, 21 bp, Artificial sequence
  SiRNA target sequence
attacataaaatgtctatgat

SEQ ID NO: 309490 - DNA, 21 bp, Artificial sequence
  SiRNA target sequence
ttacataaaatgtctatgatg

SEQ ID NO: 309491 - DNA, 21 bp, Artificial sequence
  SiRNA target sequence
tacataaaatgtctatgatgg

SEQ ID NO: 309492 - DNA, 21 bp, Artificial sequence
  SiRNA target sequence
acataaaatgtctatgatggg

SEQ ID NO: 309493 - DNA, 21 bp, Artificial sequence
  SiRNA target sequence
cataaaatgtctatgatgggt

SEQ ID NO: 309494 - DNA, 21 bp, Artificial sequence
  SiRNA target sequence
ataaaatgtctatgatgggtc

SEQ ID NO: 309495 - DNA, 21 bp, Artificial sequence
  SiRNA target sequence
taaaatgtctatgatgggtca

SEQ ID NO: 309496 - DNA, 21 bp, Artificial sequence
  SiRNA target sequence
aaaatgtctatgatgggtcat

SEQ ID NO: 309497 - DNA, 21 bp, Artificial sequence
  SiRNA target sequence
aaatgtctatgatgggtcatt

SEQ ID NO: 309498 - DNA, 21 bp, Artificial sequence
  SiRNA target sequence
aatgtctatgatgggtcatta

SEQ ID NO: 309499 - DNA, 21 bp, Artificial sequence
  SiRNA target sequence
atgtctatgatgggtcattac

SEQ ID NO: 309500 - DNA, 21 bp, Artificial sequence
  SiRNA target sequence
tgtctatgatgggtcattacg

SEQ ID NO: 309501 - DNA, 21 bp, Artificial sequence
  SiRNA target sequence
gtctatgatgggtcattacgt

SEQ ID NO: 309502 - DNA, 21 bp, Artificial sequence
  SiRNA target sequence
tctatgatgggtcattacgtc

SEQ ID NO: 309503 - DNA, 21 bp, Artificial sequence
  SiRNA target sequence
ctatgatgggtcattacgtca

SEQ ID NO: 309504 - DNA, 21 bp, Artificial sequence
  SiRNA target sequence
tatgatgggtcattacgtcag

SEQ ID NO: 309505 - DNA, 21 bp, Artificial sequence
  SiRNA target sequence
atgatgggtcattacgtcaga

SEQ ID NO: 309506 - DNA, 21 bp, Artificial sequence
  SiRNA target sequence
tgatgggtcattacgtcagag

SEQ ID NO: 309507 - DNA, 21 bp, Artificial sequence
  SiRNA target sequence
gatgggtcattacgtcagagt

SEQ ID NO: 309508 - DNA, 21 bp, Artificial sequence
  SiRNA target sequence
atgggtcattacgtcagagtg

SEQ ID NO: 309509 - DNA, 21 bp, Artificial sequence
  SiRNA target sequence
tgggtcattacgtcagagtga

SEQ ID NO: 309510 - DNA, 21 bp, Artificial sequence
  SiRNA target sequence
gggtcattacgtcagagtgat

SEQ ID NO: 309511 - DNA, 21 bp, Artificial sequence
  SiRNA target sequence
ggtcattacgtcagagtgatg

SEQ ID NO: 309512 - DNA, 21 bp, Artificial sequence
  SiRNA target sequence
gtcattacgtcagagtgatgg

SEQ ID NO: 309513 - DNA, 21 bp, Artificial sequence
  SiRNA target sequence
tcattacgtcagagtgatgga

SEQ ID NO: 309514 - DNA, 21 bp, Artificial sequence
  SiRNA target sequence
cattacgtcagagtgatggaa

SEQ ID NO: 309515 - DNA, 21 bp, Artificial sequence
  SiRNA target sequence
attacgtcagagtgatggaag

SEQ ID NO: 309516 - DNA, 21 bp, Artificial sequence
  SiRNA target sequence
ttacgtcagagtgatggaagg

SEQ ID NO: 309517 - DNA, 21 bp, Artificial sequence
  SiRNA target sequence
tacgtcagagtgatggaagga

SEQ ID NO: 309518 - DNA, 21 bp, Artificial sequence
  SiRNA target sequence
acgtcagagtgatggaaggaa

SEQ ID NO: 309519 - DNA, 21 bp, Artificial sequence
  SiRNA target sequence
cgtcagagtgatggaaggaaa

SEQ ID NO: 309520 - DNA, 21 bp, Artificial sequence
  SiRNA target sequence
gtcagagtgatggaaggaaaa

SEQ ID NO: 309521 - DNA, 21 bp, Artificial sequence
  SiRNA target sequence
tcagagtgatggaaggaaaaa

SEQ ID NO: 309522 - DNA, 21 bp, Artificial sequence
  SiRNA target sequence
cagagtgatggaaggaaaaac

SEQ ID NO: 309523 - DNA, 21 bp, Artificial sequence
  SiRNA target sequence
  misc_feature (21)..(21): n is a, c, g, or t
agagtgatggaaggaaaaacn

SEQ ID NO: 309524 - DNA, 21 bp, Artificial sequence
  SiRNA target sequence
  misc_feature (20)..(20): n is a, c, g, or t
gagtgatggaaggaaaaacnt

SEQ ID NO: 309525 - DNA, 21 bp, Artificial sequence
  SiRNA target sequence
  misc_feature (19)..(19): n is a, c, g, or t
agtgatggaaggaaaaacntt

SEQ ID NO: 309526 - DNA, 21 bp, Artificial sequence
  SiRNA target sequence
  misc_feature (18)..(18): n is a, c, g, or t
gtgatggaaggaaaaacnttt

SEQ ID NO: 309527 - DNA, 21 bp, Artificial sequence
  SiRNA target sequence
  misc_feature (17)..(17): n is a, c, g, or t
tgatggaaggaaaaacnttta

SEQ ID NO: 309528 - DNA, 21 bp, Artificial sequence
  SiRNA target sequence
  misc_feature (16)..(16): n is a, c, g, or t
gatggaaggaaaaacntttag

SEQ ID NO: 309529 - DNA, 21 bp, Artificial sequence
  SiRNA target sequence
  misc_feature (15)..(15): n is a, c, g, or t
atggaaggaaaaacntttaga

SEQ ID NO: 309530 - DNA, 21 bp, Artificial sequence
  SiRNA target sequence
  misc_feature (14)..(14): n is a, c, g, or t
tggaaggaaaaacntttagat

SEQ ID NO: 309531 - DNA, 21 bp, Artificial sequence
  SiRNA target sequence
  misc_feature (13)..(13): n is a, c, g, or t
ggaaggaaaaacntttagatt

SEQ ID NO: 309532 - DNA, 21 bp, Artificial sequence
  SiRNA target sequence
  misc_feature (12)..(12): n is a, c, g, or t
gaaggaaaaacntttagatta

SEQ ID NO: 309533 - DNA, 21 bp, Artificial sequence
  SiRNA target sequence
  misc_feature (11)..(11): n is a, c, g, or t
aaggaaaaacntttagattaa

SEQ ID NO: 309534 - DNA, 21 bp, Artificial sequence
  SiRNA target sequence
  misc_feature (10)..(10): n is a, c, g, or t
aggaaaaacntttagattaaa

SEQ ID NO: 309535 - DNA, 21 bp, Artificial sequence
  SiRNA target sequence
  misc_feature (9)..(9): n is a, c, g, or t
ggaaaaacntttagattaaat

SEQ ID NO: 309536 - DNA, 21 bp, Artificial sequence
  SiRNA target sequence
  misc_feature (8)..(8): n is a, c, g, or t
gaaaaacntttagattaaatt

SEQ ID NO: 309537 - DNA, 21 bp, Artificial sequence
  SiRNA target sequence
  misc_feature (7)..(7): n is a, c, g, or t
aaaaacntttagattaaattt

SEQ ID NO: 309538 - DNA, 21 bp, Artificial sequence
  SiRNA target sequence
  misc_feature (6)..(6): n is a, c, g, or t
aaaacntttagattaaatttg

SEQ ID NO: 309539 - DNA, 21 bp, Artificial sequence
  SiRNA target sequence
  misc_feature (5)..(5): n is a, c, g, or t
aaacntttagattaaatttga

SEQ ID NO: 309540 - DNA, 21 bp, Artificial sequence
  SiRNA target sequence
  misc_feature (4)..(4): n is a, c, g, or t
aacntttagattaaatttgag

SEQ ID NO: 309541 - DNA, 21 bp, Artificial sequence
  SiRNA target sequence
  misc_feature (3)..(3): n is a, c, g, or t
acntttagattaaatttgagt

SEQ ID NO: 309542 - DNA, 21 bp, Artificial sequence
  SiRNA target sequence
  misc_feature (2)..(2): n is a, c, g, or t
cntttagattaaatttgagtg

SEQ ID NO: 309543 - DNA, 21 bp, Artificial sequence
  SiRNA target sequence
  misc_feature (1)..(1): n is a, c, g, or t
ntttagattaaatttgagtgt

SEQ ID NO: 309544 - DNA, 21 bp, Artificial sequence
  SiRNA target sequence
tttagattaaatttgagtgtc

SEQ ID NO: 309545 - DNA, 21 bp, Artificial sequence
  SiRNA target sequence
ttagattaaatttgagtgtca

SEQ ID NO: 309546 - DNA, 21 bp, Artificial sequence
  SiRNA target sequence
tagattaaatttgagtgtcac

SEQ ID NO: 309547 - DNA, 21 bp, Artificial sequence
  SiRNA target sequence
agattaaatttgagtgtcaca

SEQ ID NO: 309548 - DNA, 21 bp, Artificial sequence
  SiRNA target sequence
gattaaatttgagtgtcacaa

SEQ ID NO: 309549 - DNA, 21 bp, Artificial sequence
  SiRNA target sequence
attaaatttgagtgtcacaac

SEQ ID NO: 309550 - DNA, 21 bp, Artificial sequence
  SiRNA target sequence
ttaaatttgagtgtcacaact

SEQ ID NO: 309551 - DNA, 21 bp, Artificial sequence
  SiRNA target sequence
taaatttgagtgtcacaactc

SEQ ID NO: 309552 - DNA, 21 bp, Artificial sequence
  SiRNA target sequence
aaatttgagtgtcacaactcc

SEQ ID NO: 309553 - DNA, 21 bp, Artificial sequence
  SiRNA target sequence
aatttgagtgtcacaactccg

SEQ ID NO: 309554 - DNA, 21 bp, Artificial sequence
  SiRNA target sequence
atttgagtgtcacaactccgt

SEQ ID NO: 309555 - DNA, 21 bp, Artificial sequence
  SiRNA target sequence
tttgagtgtcacaactccgta

SEQ ID NO: 309556 - DNA, 21 bp, Artificial sequence
  SiRNA target sequence
ttgagtgtcacaactccgtat

SEQ ID NO: 309557 - DNA, 21 bp, Artificial sequence
  SiRNA target sequence
tgagtgtcacaactccgtata

SEQ ID NO: 309558 - DNA, 21 bp, Artificial sequence
  SiRNA target sequence
gagtgtcacaactccgtataa

SEQ ID NO: 309559 - DNA, 21 bp, Artificial sequence
  SiRNA target sequence
agtgtcacaactccgtataat

SEQ ID NO: 309560 - DNA, 21 bp, Artificial sequence
  SiRNA target sequence
gtgtcacaactccgtataatg

SEQ ID NO: 309561 - DNA, 21 bp, Artificial sequence
  SiRNA target sequence
tgtcacaactccgtataatgc

SEQ ID NO: 309562 - DNA, 21 bp, Artificial sequence
  SiRNA target sequence
gtcacaactccgtataatgca

SEQ ID NO: 309563 - DNA, 21 bp, Artificial sequence
  SiRNA target sequence
tcacaactccgtataatgcag

SEQ ID NO: 309564 - DNA, 21 bp, Artificial sequence
  SiRNA target sequence
cacaactccgtataatgcaga

SEQ ID NO: 309565 - DNA, 21 bp, Artificial sequence
  SiRNA target sequence
acaactccgtataatgcagat

SEQ ID NO: 309566 - DNA, 21 bp, Artificial sequence
  SiRNA target sequence
caactccgtataatgcagatt

SEQ ID NO: 309567 - DNA, 21 bp, Artificial sequence
  SiRNA target sequence
aactccgtataatgcagattt

SEQ ID NO: 309568 - DNA, 21 bp, Artificial sequence
  SiRNA target sequence
actccgtataatgcagatttt

SEQ ID NO: 309569 - DNA, 21 bp, Artificial sequence
  SiRNA target sequence
ctccgtataatgcagattttg

SEQ ID NO: 309570 - DNA, 21 bp, Artificial sequence
  SiRNA target sequence
tccgtataatgcagattttga

SEQ ID NO: 309571 - DNA, 21 bp, Artificial sequence
  SiRNA target sequence
ccgtataatgcagattttgac

SEQ ID NO: 309572 - DNA, 21 bp, Artificial sequence
  SiRNA target sequence
cgtataatgcagattttgacg

SEQ ID NO: 309573 - DNA, 21 bp, Artificial sequence
  SiRNA target sequence
gtataatgcagattttgacgg

SEQ ID NO: 309574 - DNA, 21 bp, Artificial sequence
  SiRNA target sequence
tataatgcagattttgacgga

SEQ ID NO: 309575 - DNA, 21 bp, Artificial sequence
  SiRNA target sequence
ataatgcagattttgacggag

SEQ ID NO: 309576 - DNA, 21 bp, Artificial sequence
  SiRNA target sequence
taatgcagattttgacggaga

SEQ ID NO: 309577 - DNA, 21 bp, Artificial sequence
  SiRNA target sequence
aatgcagattttgacggagat

SEQ ID NO: 309578 - DNA, 21 bp, Artificial sequence
  SiRNA target sequence
atgcagattttgacggagatg

SEQ ID NO: 309579 - DNA, 21 bp, Artificial sequence
  SiRNA target sequence
tgcagattttgacggagatga

SEQ ID NO: 309580 - DNA, 21 bp, Artificial sequence
  SiRNA target sequence
gcagattttgacggagatgaa

SEQ ID NO: 309581 - DNA, 21 bp, Artificial sequence
  SiRNA target sequence
cagattttgacggagatgaaa

SEQ ID NO: 309582 - DNA, 21 bp, Artificial sequence
  SiRNA target sequence
agattttgacggagatgaaat

SEQ ID NO: 309583 - DNA, 21 bp, Artificial sequence
  SiRNA target sequence
gattttgacggagatgaaatg

SEQ ID NO: 309584 - DNA, 21 bp, Artificial sequence
  SiRNA target sequence
attttgacggagatgaaatga

SEQ ID NO: 309585 - DNA, 21 bp, Artificial sequence
  SiRNA target sequence
ttttgacggagatgaaatgaa

SEQ ID NO: 309586 - DNA, 21 bp, Artificial sequence
  SiRNA target sequence
tttgacggagatgaaatgaat

SEQ ID NO: 309587 - DNA, 21 bp, Artificial sequence
  SiRNA target sequence
ttgacggagatgaaatgaatt

SEQ ID NO: 309588 - DNA, 21 bp, Artificial sequence
  SiRNA target sequence
tgacggagatgaaatgaattt

SEQ ID NO: 309589 - DNA, 21 bp, Artificial sequence
  SiRNA target sequence
gacggagatgaaatgaattta

SEQ ID NO: 309590 - DNA, 21 bp, Artificial sequence
  SiRNA target sequence
acggagatgaaatgaatttac

SEQ ID NO: 309591 - DNA, 21 bp, Artificial sequence
  SiRNA target sequence
cggagatgaaatgaatttaca

SEQ ID NO: 309592 - DNA, 21 bp, Artificial sequence
  SiRNA target sequence
ggagatgaaatgaatttacac

SEQ ID NO: 309593 - DNA, 21 bp, Artificial sequence
  SiRNA target sequence
gagatgaaatgaatttacaca

SEQ ID NO: 309594 - DNA, 21 bp, Artificial sequence
  SiRNA target sequence
agatgaaatgaatttacacat

SEQ ID NO: 309595 - DNA, 21 bp, Artificial sequence
  SiRNA target sequence
gatgaaatgaatttacacatg

SEQ ID NO: 309596 - DNA, 21 bp, Artificial sequence
  SiRNA target sequence
atgaaatgaatttacacatgc

SEQ ID NO: 309597 - DNA, 21 bp, Artificial sequence
  SiRNA target sequence
tgaaatgaatttacacatgcc

SEQ ID NO: 309598 - DNA, 21 bp, Artificial sequence
  SiRNA target sequence
gaaatgaatttacacatgcca

SEQ ID NO: 309599 - DNA, 21 bp, Artificial sequence
  SiRNA target sequence
aaatgaatttacacatgccac

SEQ ID NO: 309600 - DNA, 21 bp, Artificial sequence
  SiRNA target sequence
aatgaatttacacatgccaca

SEQ ID NO: 309601 - DNA, 21 bp, Artificial sequence
  SiRNA target sequence
atgaatttacacatgccacaa

SEQ ID NO: 309602 - DNA, 21 bp, Artificial sequence
  SiRNA target sequence
tgaatttacacatgccacaat

SEQ ID NO: 309603 - DNA, 21 bp, Artificial sequence
  SiRNA target sequence
gaatttacacatgccacaatc

SEQ ID NO: 309604 - DNA, 21 bp, Artificial sequence
  SiRNA target sequence
aatttacacatgccacaatca

SEQ ID NO: 309605 - DNA, 21 bp, Artificial sequence
  SiRNA target sequence
atttacacatgccacaatcac

SEQ ID NO: 309606 - DNA, 21 bp, Artificial sequence
  SiRNA target sequence
tttacacatgccacaatcaca

SEQ ID NO: 309607 - DNA, 21 bp, Artificial sequence
  SiRNA target sequence
ttacacatgccacaatcacat

SEQ ID NO: 309608 - DNA, 21 bp, Artificial sequence
  SiRNA target sequence
tacacatgccacaatcacata

SEQ ID NO: 309609 - DNA, 21 bp, Artificial sequence
  SiRNA target sequence
acacatgccacaatcacataa

SEQ ID NO: 309610 - DNA, 21 bp, Artificial sequence
  SiRNA target sequence
cacatgccacaatcacataat

SEQ ID NO: 309611 - DNA, 21 bp, Artificial sequence
  SiRNA target sequence
acatgccacaatcacataatt

SEQ ID NO: 309612 - DNA, 21 bp, Artificial sequence
  SiRNA target sequence
catgccacaatcacataattc

SEQ ID NO: 309613 - DNA, 21 bp, Artificial sequence
  SiRNA target sequence
atgccacaatcacataattca

SEQ ID NO: 309614 - DNA, 21 bp, Artificial sequence
  SiRNA target sequence
tgccacaatcacataattcaa

SEQ ID NO: 309615 - DNA, 21 bp, Artificial sequence
  SiRNA target sequence
gccacaatcacataattcaag

SEQ ID NO: 309616 - DNA, 21 bp, Artificial sequence
  SiRNA target sequence
ccacaatcacataattcaaga

SEQ ID NO: 309617 - DNA, 21 bp, Artificial sequence
  SiRNA target sequence
cacaatcacataattcaagag

SEQ ID NO: 309618 - DNA, 21 bp, Artificial sequence
  SiRNA target sequence
acaatcacataattcaagagc

SEQ ID NO: 309619 - DNA, 21 bp, Artificial sequence
  SiRNA target sequence
caatcacataattcaagagca

SEQ ID NO: 309620 - DNA, 21 bp, Artificial sequence
  SiRNA target sequence
aatcacataattcaagagcag

SEQ ID NO: 309621 - DNA, 21 bp, Artificial sequence
  SiRNA target sequence
atcacataattcaagagcaga

SEQ ID NO: 309622 - DNA, 21 bp, Artificial sequence
  SiRNA target sequence
tcacataattcaagagcagag

SEQ ID NO: 309623 - DNA, 21 bp, Artificial sequence
  SiRNA target sequence
cacataattcaagagcagagc

SEQ ID NO: 309624 - DNA, 21 bp, Artificial sequence
  SiRNA target sequence
acataattcaagagcagagct

SEQ ID NO: 309625 - DNA, 21 bp, Artificial sequence
  SiRNA target sequence
cataattcaagagcagagctt

SEQ ID NO: 309626 - DNA, 21 bp, Artificial sequence
  SiRNA target sequence
ataattcaagagcagagcttg

SEQ ID NO: 309627 - DNA, 21 bp, Artificial sequence
  SiRNA target sequence
taattcaagagcagagcttga

SEQ ID NO: 309628 - DNA, 21 bp, Artificial sequence
  SiRNA target sequence
aattcaagagcagagcttgaa

SEQ ID NO: 309629 - DNA, 21 bp, Artificial sequence
  SiRNA target sequence
attcaagagcagagcttgaag

SEQ ID NO: 309630 - DNA, 21 bp, Artificial sequence
  SiRNA target sequence
ttcaagagcagagcttgaaga

SEQ ID NO: 309631 - DNA, 21 bp, Artificial sequence
  SiRNA target sequence
tcaagagcagagcttgaagaa

SEQ ID NO: 309632 - DNA, 21 bp, Artificial sequence
  SiRNA target sequence
caagagcagagcttgaagaac

SEQ ID NO: 309633 - DNA, 21 bp, Artificial sequence
  SiRNA target sequence
aagagcagagcttgaagaact

SEQ ID NO: 309634 - DNA, 21 bp, Artificial sequence
  SiRNA target sequence
agagcagagcttgaagaactc

SEQ ID NO: 309635 - DNA, 21 bp, Artificial sequence
  SiRNA target sequence
gagcagagcttgaagaactct

SEQ ID NO: 309636 - DNA, 21 bp, Artificial sequence
  SiRNA target sequence
agcagagcttgaagaactctg

SEQ ID NO: 309637 - DNA, 21 bp, Artificial sequence
  SiRNA target sequence
gcagagcttgaagaactctgt

SEQ ID NO: 309638 - DNA, 21 bp, Artificial sequence
  SiRNA target sequence
cagagcttgaagaactctgtc

SEQ ID NO: 309639 - DNA, 21 bp, Artificial sequence
  SiRNA target sequence
agagcttgaagaactctgtct

SEQ ID NO: 309640 - DNA, 21 bp, Artificial sequence
  SiRNA target sequence
gagcttgaagaactctgtctg

SEQ ID NO: 309641 - DNA, 21 bp, Artificial sequence
  SiRNA target sequence
agcttgaagaactctgtctgg

SEQ ID NO: 309642 - DNA, 21 bp, Artificial sequence
  SiRNA target sequence
gcttgaagaactctgtctggt

SEQ ID NO: 309643 - DNA, 21 bp, Artificial sequence
  SiRNA target sequence
cttgaagaactctgtctggta

SEQ ID NO: 309644 - DNA, 21 bp, Artificial sequence
  SiRNA target sequence
ttgaagaactctgtctggtat

SEQ ID NO: 309645 - DNA, 21 bp, Artificial sequence
  SiRNA target sequence
tgaagaactctgtctggtatc

SEQ ID NO: 309646 - DNA, 21 bp, Artificial sequence
  SiRNA target sequence
gaagaactctgtctggtatct

SEQ ID NO: 309647 - DNA, 21 bp, Artificial sequence
  SiRNA target sequence
aagaactctgtctggtatcta

SEQ ID NO: 309648 - DNA, 21 bp, Artificial sequence
  SiRNA target sequence
agaactctgtctggtatctaa

SEQ ID NO: 309649 - DNA, 21 bp, Artificial sequence
  SiRNA target sequence
gaactctgtctggtatctaaa

SEQ ID NO: 309650 - DNA, 21 bp, Artificial sequence
  SiRNA target sequence
aactctgtctggtatctaaac

SEQ ID NO: 309651 - DNA, 21 bp, Artificial sequence
  SiRNA target sequence
actctgtctggtatctaaaca

SEQ ID NO: 309652 - DNA, 21 bp, Artificial sequence
  SiRNA target sequence
ctctgtctggtatctaaacaa

SEQ ID NO: 309653 - DNA, 21 bp, Artificial sequence
  SiRNA target sequence
tctgtctggtatctaaacaag

SEQ ID NO: 309654 - DNA, 21 bp, Artificial sequence
  SiRNA target sequence
ctgtctggtatctaaacaagt

SEQ ID NO: 309655 - DNA, 21 bp, Artificial sequence
  SiRNA target sequence
tgtctggtatctaaacaagta

SEQ ID NO: 309656 - DNA, 21 bp, Artificial sequence
  SiRNA target sequence
gtctggtatctaaacaagtat

SEQ ID NO: 309657 - DNA, 21 bp, Artificial sequence
  SiRNA target sequence
tctggtatctaaacaagtatt

SEQ ID NO: 309658 - DNA, 21 bp, Artificial sequence
  SiRNA target sequence
ctggtatctaaacaagtattg

SEQ ID NO: 309659 - DNA, 21 bp, Artificial sequence
  SiRNA target sequence
tggtatctaaacaagtattga

SEQ ID NO: 309660 - DNA, 21 bp, Artificial sequence
  SiRNA target sequence
ggtatctaaacaagtattgac

SEQ ID NO: 309661 - DNA, 21 bp, Artificial sequence
  SiRNA target sequence
gtatctaaacaagtattgaca

SEQ ID NO: 309662 - DNA, 21 bp, Artificial sequence
  SiRNA target sequence
tatctaaacaagtattgacac

SEQ ID NO: 309663 - DNA, 21 bp, Artificial sequence
  SiRNA target sequence
atctaaacaagtattgacacc

SEQ ID NO: 309664 - DNA, 21 bp, Artificial sequence
  SiRNA target sequence
tctaaacaagtattgacacca

SEQ ID NO: 309665 - DNA, 21 bp, Artificial sequence
  SiRNA target sequence
ctaaacaagtattgacaccac

SEQ ID NO: 309666 - DNA, 21 bp, Artificial sequence
  SiRNA target sequence
taaacaagtattgacaccaca

SEQ ID NO: 309667 - DNA, 21 bp, Artificial sequence
  SiRNA target sequence
aaacaagtattgacaccacaa

SEQ ID NO: 309668 - DNA, 21 bp, Artificial sequence
  SiRNA target sequence
aacaagtattgacaccacaag

SEQ ID NO: 309669 - DNA, 21 bp, Artificial sequence
  SiRNA target sequence
acaagtattgacaccacaagc

SEQ ID NO: 309670 - DNA, 21 bp, Artificial sequence
  SiRNA target sequence
caagtattgacaccacaagct

SEQ ID NO: 309671 - DNA, 21 bp, Artificial sequence
  SiRNA target sequence
aagtattgacaccacaagcta

SEQ ID NO: 309672 - DNA, 21 bp, Artificial sequence
  SiRNA target sequence
agtattgacaccacaagctaa

SEQ ID NO: 309673 - DNA, 21 bp, Artificial sequence
  SiRNA target sequence
gtattgacaccacaagctaat

SEQ ID NO: 309674 - DNA, 21 bp, Artificial sequence
  SiRNA target sequence
tattgacaccacaagctaatc

SEQ ID NO: 309675 - DNA, 21 bp, Artificial sequence
  SiRNA target sequence
attgacaccacaagctaatcg

SEQ ID NO: 309676 - DNA, 21 bp, Artificial sequence
  SiRNA target sequence
ttgacaccacaagctaatcgt

SEQ ID NO: 309677 - DNA, 21 bp, Artificial sequence
  SiRNA target sequence
tgacaccacaagctaatcgtc

SEQ ID NO: 309678 - DNA, 21 bp, Artificial sequence
  SiRNA target sequence
gacaccacaagctaatcgtcc

SEQ ID NO: 309679 - DNA, 21 bp, Artificial sequence
  SiRNA target sequence
acaccacaagctaatcgtcct

SEQ ID NO: 309680 - DNA, 21 bp, Artificial sequence
  SiRNA target sequence
caccacaagctaatcgtccta

SEQ ID NO: 309681 - DNA, 21 bp, Artificial sequence
  SiRNA target sequence
accacaagctaatcgtcctat

SEQ ID NO: 309682 - DNA, 21 bp, Artificial sequence
  SiRNA target sequence
ccacaagctaatcgtcctata

SEQ ID NO: 309683 - DNA, 21 bp, Artificial sequence
  SiRNA target sequence
cacaagctaatcgtcctataa

SEQ ID NO: 309684 - DNA, 21 bp, Artificial sequence
  SiRNA target sequence
acaagctaatcgtcctataat

SEQ ID NO: 309685 - DNA, 21 bp, Artificial sequence
  SiRNA target sequence
caagctaatcgtcctataatg

SEQ ID NO: 309686 - DNA, 21 bp, Artificial sequence
  SiRNA target sequence
aagctaatcgtcctataatgg

SEQ ID NO: 309687 - DNA, 21 bp, Artificial sequence
  SiRNA target sequence
agctaatcgtcctataatggg

SEQ ID NO: 309688 - DNA, 21 bp, Artificial sequence
  SiRNA target sequence
gctaatcgtcctataatgggt

SEQ ID NO: 309689 - DNA, 21 bp, Artificial sequence
  SiRNA target sequence
ctaatcgtcctataatgggta

SEQ ID NO: 309690 - DNA, 21 bp, Artificial sequence
  SiRNA target sequence
taatcgtcctataatgggtat

SEQ ID NO: 309691 - DNA, 21 bp, Artificial sequence
  SiRNA target sequence
aatcgtcctataatgggtatt

SEQ ID NO: 309692 - DNA, 21 bp, Artificial sequence
  SiRNA target sequence
atcgtcctataatgggtattg

SEQ ID NO: 309693 - DNA, 21 bp, Artificial sequence
  SiRNA target sequence
tcgtcctataatgggtattgt

SEQ ID NO: 309694 - DNA, 21 bp, Artificial sequence
  SiRNA target sequence
cgtcctataatgggtattgta

SEQ ID NO: 309695 - DNA, 21 bp, Artificial sequence
  SiRNA target sequence
gtcctataatgggtattgtac

SEQ ID NO: 309696 - DNA, 21 bp, Artificial sequence
  SiRNA target sequence
tcctataatgggtattgtaca

SEQ ID NO: 309697 - DNA, 21 bp, Artificial sequence
  SiRNA target sequence
cctataatgggtattgtacaa

SEQ ID NO: 309698 - DNA, 21 bp, Artificial sequence
  SiRNA target sequence
ctataatgggtattgtacaag

SEQ ID NO: 309699 - DNA, 21 bp, Artificial sequence
  SiRNA target sequence
tataatgggtattgtacaaga

SEQ ID NO: 309700 - DNA, 21 bp, Artificial sequence
  SiRNA target sequence
  misc_feature (21)..(21): n is a, c, g, or t
ataatgggtattgtacaagan

SEQ ID NO: 309701 - DNA, 21 bp, Artificial sequence
  SiRNA target sequence
  misc_feature (20)..(20): n is a, c, g, or t
taatgggtattgtacaagana

SEQ ID NO: 309702 - DNA, 21 bp, Artificial sequence
  SiRNA target sequence
  misc_feature (19)..(19): n is a, c, g, or t
aatgggtattgtacaaganac

SEQ ID NO: 309703 - DNA, 21 bp, Artificial sequence
  SiRNA target sequence
  misc_feature (18)..(18): n is a, c, g, or t
atgggtattgtacaaganaca

SEQ ID NO: 309704 - DNA, 21 bp, Artificial sequence
  SiRNA target sequence
  misc_feature (17)..(17): n is a, c, g, or t
tgggtattgtacaaganacac

SEQ ID NO: 309705 - DNA, 21 bp, Artificial sequence
  SiRNA target sequence
  misc_feature (16)..(16): n is a, c, g, or t
gggtattgtacaaganacact

SEQ ID NO: 309706 - DNA, 21 bp, Artificial sequence
  SiRNA target sequence
  misc_feature (15)..(15): n is a, c, g, or t
ggtattgtacaaganacacta

SEQ ID NO: 309707 - DNA, 21 bp, Artificial sequence
  SiRNA target sequence
  misc_feature (14)..(14): n is a, c, g, or t
gtattgtacaaganacactaa

SEQ ID NO: 309708 - DNA, 21 bp, Artificial sequence
  SiRNA target sequence
  misc_feature (13)..(13): n is a, c, g, or t
tattgtacaaganacactaac

SEQ ID NO: 309709 - DNA, 21 bp, Artificial sequence
  SiRNA target sequence
  misc_feature (12)..(12): n is a, c, g, or t
attgtacaaganacactaact

SEQ ID NO: 309710 - DNA, 21 bp, Artificial sequence
  SiRNA target sequence
  misc_feature (11)..(11): n is a, c, g, or t
ttgtacaaganacactaactg

SEQ ID NO: 309711 - DNA, 21 bp, Artificial sequence
  SiRNA target sequence
  misc_feature (10)..(10): n is a, c, g, or t
tgtacaaganacactaactgg

SEQ ID NO: 309712 - DNA, 21 bp, Artificial sequence
  SiRNA target sequence
  misc_feature (9)..(9): n is a, c, g, or t
gtacaaganacactaactgga

SEQ ID NO: 309713 - DNA, 21 bp, Artificial sequence
  SiRNA target sequence
  misc_feature (8)..(8): n is a, c, g, or t
tacaaganacactaactggac

SEQ ID NO: 309714 - DNA, 21 bp, Artificial sequence
  SiRNA target sequence
  misc_feature (7)..(7): n is a, c, g, or t
acaaganacactaactggact

SEQ ID NO: 309715 - DNA, 21 bp, Artificial sequence
  SiRNA target sequence
  misc_feature (6)..(6): n is a, c, g, or t
caaganacactaactggactt

SEQ ID NO: 309716 - DNA, 21 bp, Artificial sequence
  SiRNA target sequence
  misc_feature (5)..(5): n is a, c, g, or t
aaganacactaactggacttc

SEQ ID NO: 309717 - DNA, 21 bp, Artificial sequence
  SiRNA target sequence
  misc_feature (4)..(4): n is a, c, g, or t
aganacactaactggacttcg

SEQ ID NO: 309718 - DNA, 21 bp, Artificial sequence
  SiRNA target sequence
  misc_feature (3)..(3): n is a, c, g, or t
ganacactaactggacttcgt

SEQ ID NO: 309719 - DNA, 21 bp, Artificial sequence
  SiRNA target sequence
  misc_feature (2)..(2): n is a, c, g, or t
anacactaactggacttcgtt

SEQ ID NO: 309720 - DNA, 21 bp, Artificial sequence
  SiRNA target sequence
  misc_feature (1)..(1): n is a, c, g, or t
nacactaactggacttcgttt

SEQ ID NO: 309721 - DNA, 21 bp, Artificial sequence
  SiRNA target sequence
acactaactggacttcgtttg

SEQ ID NO: 309722 - DNA, 21 bp, Artificial sequence
  SiRNA target sequence
cactaactggacttcgtttgt

SEQ ID NO: 309723 - DNA, 21 bp, Artificial sequence
  SiRNA target sequence
actaactggacttcgtttgtt

SEQ ID NO: 309724 - DNA, 21 bp, Artificial sequence
  SiRNA target sequence
ctaactggacttcgtttgttt

SEQ ID NO: 309725 - DNA, 21 bp, Artificial sequence
  SiRNA target sequence
taactggacttcgtttgttta

SEQ ID NO: 309726 - DNA, 21 bp, Artificial sequence
  SiRNA target sequence
aactggacttcgtttgtttac

SEQ ID NO: 309727 - DNA, 21 bp, Artificial sequence
  SiRNA target sequence
actggacttcgtttgtttact

SEQ ID NO: 309728 - DNA, 21 bp, Artificial sequence
  SiRNA target sequence
ctggacttcgtttgtttactt

SEQ ID NO: 309729 - DNA, 21 bp, Artificial sequence
  SiRNA target sequence
tggacttcgtttgtttacttt

SEQ ID NO: 309730 - DNA, 21 bp, Artificial sequence
  SiRNA target sequence
ggacttcgtttgtttacttta

SEQ ID NO: 309731 - DNA, 21 bp, Artificial sequence
  SiRNA target sequence
gacttcgtttgtttactttaa

SEQ ID NO: 309732 - DNA, 21 bp, Artificial sequence
  SiRNA target sequence
acttcgtttgtttactttaag

SEQ ID NO: 309733 - DNA, 21 bp, Artificial sequence
  SiRNA target sequence
cttcgtttgtttactttaaga

SEQ ID NO: 309734 - DNA, 21 bp, Artificial sequence
  SiRNA target sequence
ttcgtttgtttactttaagag

SEQ ID NO: 309735 - DNA, 21 bp, Artificial sequence
  SiRNA target sequence
tcgtttgtttactttaagaga

SEQ ID NO: 309736 - DNA, 21 bp, Artificial sequence
  SiRNA target sequence
cgtttgtttactttaagagac

SEQ ID NO: 309737 - DNA, 21 bp, Artificial sequence
  SiRNA target sequence
gtttgtttactttaagagact

SEQ ID NO: 309738 - DNA, 21 bp, Artificial sequence
  SiRNA target sequence
tttgtttactttaagagactc

SEQ ID NO: 309739 - DNA, 21 bp, Artificial sequence
  SiRNA target sequence
ttgtttactttaagagactcg

SEQ ID NO: 309740 - DNA, 21 bp, Artificial sequence
  SiRNA target sequence
tgtttactttaagagactcgt

SEQ ID NO: 309741 - DNA, 21 bp, Artificial sequence
  SiRNA target sequence
gtttactttaagagactcgtt

SEQ ID NO: 309742 - DNA, 21 bp, Artificial sequence
  SiRNA target sequence
tttactttaagagactcgttt

SEQ ID NO: 309743 - DNA, 21 bp, Artificial sequence
  SiRNA target sequence
ttactttaagagactcgtttt

SEQ ID NO: 309744 - DNA, 21 bp, Artificial sequence
  SiRNA target sequence
tactttaagagactcgttttt

SEQ ID NO: 309745 - DNA, 21 bp, Artificial sequence
  SiRNA target sequence
actttaagagactcgtttttt

SEQ ID NO: 309746 - DNA, 21 bp, Artificial sequence
  SiRNA target sequence
ctttaagagactcgttttttg

SEQ ID NO: 309747 - DNA, 21 bp, Artificial sequence
  SiRNA target sequence
tttaagagactcgttttttga

SEQ ID NO: 309748 - DNA, 21 bp, Artificial sequence
  SiRNA target sequence
ttaagagactcgttttttgat

SEQ ID NO: 309749 - DNA, 21 bp, Artificial sequence
  SiRNA target sequence
taagagactcgttttttgata

SEQ ID NO: 309750 - DNA, 21 bp, Artificial sequence
  SiRNA target sequence
aagagactcgttttttgataa

SEQ ID NO: 309751 - DNA, 21 bp, Artificial sequence
  SiRNA target sequence
agagactcgttttttgataaa

SEQ ID NO: 309752 - DNA, 21 bp, Artificial sequence
  SiRNA target sequence
gagactcgttttttgataaac

SEQ ID NO: 309753 - DNA, 21 bp, Artificial sequence
  SiRNA target sequence
agactcgttttttgataaacg

SEQ ID NO: 309754 - DNA, 21 bp, Artificial sequence
  SiRNA target sequence
gactcgttttttgataaacga

SEQ ID NO: 309755 - DNA, 21 bp, Artificial sequence
  SiRNA target sequence
actcgttttttgataaacgag

SEQ ID NO: 309756 - DNA, 21 bp, Artificial sequence
  SiRNA target sequence
ctcgttttttgataaacgaga

SEQ ID NO: 309757 - DNA, 21 bp, Artificial sequence
  SiRNA target sequence
tcgttttttgataaacgagaa

SEQ ID NO: 309758 - DNA, 21 bp, Artificial sequence
  SiRNA target sequence
cgttttttgataaacgagaaa

SEQ ID NO: 309759 - DNA, 21 bp, Artificial sequence
  SiRNA target sequence
gttttttgataaacgagaaac

SEQ ID NO: 309760 - DNA, 21 bp, Artificial sequence
  SiRNA target sequence
ttttttgataaacgagaaacg

SEQ ID NO: 309761 - DNA, 21 bp, Artificial sequence
  SiRNA target sequence
tttttgataaacgagaaacga

SEQ ID NO: 309762 - DNA, 21 bp, Artificial sequence
  SiRNA target sequence
ttttgataaacgagaaacgat

SEQ ID NO: 309763 - DNA, 21 bp, Artificial sequence
  SiRNA target sequence
tttgataaacgagaaacgatg

SEQ ID NO: 309764 - DNA, 21 bp, Artificial sequence
  SiRNA target sequence
ttgataaacgagaaacgatgc

SEQ ID NO: 309765 - DNA, 21 bp, Artificial sequence
  SiRNA target sequence
tgataaacgagaaacgatgct

SEQ ID NO: 309766 - DNA, 21 bp, Artificial sequence
  SiRNA target sequence
gataaacgagaaacgatgcta

SEQ ID NO: 309767 - DNA, 21 bp, Artificial sequence
  SiRNA target sequence
ataaacgagaaacgatgctat

SEQ ID NO: 309768 - DNA, 21 bp, Artificial sequence
  SiRNA target sequence
taaacgagaaacgatgctatt

SEQ ID NO: 309769 - DNA, 21 bp, Artificial sequence
  SiRNA target sequence
aaacgagaaacgatgctatta

SEQ ID NO: 309770 - DNA, 21 bp, Artificial sequence
  SiRNA target sequence
aacgagaaacgatgctattac

SEQ ID NO: 309771 - DNA, 21 bp, Artificial sequence
  SiRNA target sequence
acgagaaacgatgctattact

SEQ ID NO: 309772 - DNA, 21 bp, Artificial sequence
  SiRNA target sequence
cgagaaacgatgctattactt

SEQ ID NO: 309773 - DNA, 21 bp, Artificial sequence
  SiRNA target sequence
gagaaacgatgctattacttt

SEQ ID NO: 309774 - DNA, 21 bp, Artificial sequence
  SiRNA target sequence
agaaacgatgctattacttta

SEQ ID NO: 309775 - DNA, 21 bp, Artificial sequence
  SiRNA target sequence
gaaacgatgctattactttat

SEQ ID NO: 309776 - DNA, 21 bp, Artificial sequence
  SiRNA target sequence
aaacgatgctattactttatt

SEQ ID NO: 309777 - DNA, 21 bp, Artificial sequence
  SiRNA target sequence
aacgatgctattactttattc

SEQ ID NO: 309778 - DNA, 21 bp, Artificial sequence
  SiRNA target sequence
acgatgctattactttattca

SEQ ID NO: 309779 - DNA, 21 bp, Artificial sequence
  SiRNA target sequence
cgatgctattactttattcag

SEQ ID NO: 309780 - DNA, 21 bp, Artificial sequence
  SiRNA target sequence
gatgctattactttattcagt

SEQ ID NO: 309781 - DNA, 21 bp, Artificial sequence
  SiRNA target sequence
atgctattactttattcagta

SEQ ID NO: 309782 - DNA, 21 bp, Artificial sequence
  SiRNA target sequence
tgctattactttattcagtag

SEQ ID NO: 309783 - DNA, 21 bp, Artificial sequence
  SiRNA target sequence
gctattactttattcagtaga

SEQ ID NO: 309784 - DNA, 21 bp, Artificial sequence
  SiRNA target sequence
ctattactttattcagtagat

SEQ ID NO: 309785 - DNA, 21 bp, Artificial sequence
  SiRNA target sequence
tattactttattcagtagatc

SEQ ID NO: 309786 - DNA, 21 bp, Artificial sequence
  SiRNA target sequence
attactttattcagtagatct

SEQ ID NO: 309787 - DNA, 21 bp, Artificial sequence
  SiRNA target sequence
ttactttattcagtagatctt

SEQ ID NO: 309788 - DNA, 21 bp, Artificial sequence
  SiRNA target sequence
tactttattcagtagatcttg

SEQ ID NO: 309789 - DNA, 21 bp, Artificial sequence
  SiRNA target sequence
actttattcagtagatcttga

SEQ ID NO: 309790 - DNA, 21 bp, Artificial sequence
  SiRNA target sequence
ctttattcagtagatcttgag

SEQ ID NO: 309791 - DNA, 21 bp, Artificial sequence
  SiRNA target sequence
tttattcagtagatcttgaga

SEQ ID NO: 309792 - DNA, 21 bp, Artificial sequence
  SiRNA target sequence
ttattcagtagatcttgagaa

SEQ ID NO: 309793 - DNA, 21 bp, Artificial sequence
  SiRNA target sequence
tattcagtagatcttgagaaa

SEQ ID NO: 309794 - DNA, 21 bp, Artificial sequence
  SiRNA target sequence
attcagtagatcttgagaaat

SEQ ID NO: 309795 - DNA, 21 bp, Artificial sequence
  SiRNA target sequence
ttcagtagatcttgagaaata

SEQ ID NO: 309796 - DNA, 21 bp, Artificial sequence
  SiRNA target sequence
tcagtagatcttgagaaatat

SEQ ID NO: 309797 - DNA, 21 bp, Artificial sequence
  SiRNA target sequence
cagtagatcttgagaaatatg

SEQ ID NO: 309798 - DNA, 21 bp, Artificial sequence
  SiRNA target sequence
agtagatcttgagaaatatga

SEQ ID NO: 309799 - DNA, 21 bp, Artificial sequence
  SiRNA target sequence
gtagatcttgagaaatatgaa

SEQ ID NO: 309800 - DNA, 21 bp, Artificial sequence
  SiRNA target sequence
tagatcttgagaaatatgaaa

SEQ ID NO: 309801 - DNA, 21 bp, Artificial sequence
  SiRNA target sequence
agatcttgagaaatatgaaaa

SEQ ID NO: 309802 - DNA, 21 bp, Artificial sequence
  SiRNA target sequence
gatcttgagaaatatgaaaat

SEQ ID NO: 309803 - DNA, 21 bp, Artificial sequence
  SiRNA target sequence
atcttgagaaatatgaaaatt

SEQ ID NO: 309804 - DNA, 21 bp, Artificial sequence
  SiRNA target sequence
tcttgagaaatatgaaaattt

SEQ ID NO: 309805 - DNA, 21 bp, Artificial sequence
  SiRNA target sequence
cttgagaaatatgaaaattta

SEQ ID NO: 309806 - DNA, 21 bp, Artificial sequence
  SiRNA target sequence
ttgagaaatatgaaaatttaa

SEQ ID NO: 309807 - DNA, 21 bp, Artificial sequence
  SiRNA target sequence
tgagaaatatgaaaatttaaa

SEQ ID NO: 309808 - DNA, 21 bp, Artificial sequence
  SiRNA target sequence
gagaaatatgaaaatttaaaa

SEQ ID NO: 309809 - DNA, 21 bp, Artificial sequence
  SiRNA target sequence
agaaatatgaaaatttaaaag

SEQ ID NO: 309810 - DNA, 21 bp, Artificial sequence
  SiRNA target sequence
gaaatatgaaaatttaaaaga

SEQ ID NO: 309811 - DNA, 21 bp, Artificial sequence
  SiRNA target sequence
aaatatgaaaatttaaaagaa

SEQ ID NO: 309812 - DNA, 21 bp, Artificial sequence
  SiRNA target sequence
aatatgaaaatttaaaagaag

SEQ ID NO: 309813 - DNA, 21 bp, Artificial sequence
  SiRNA target sequence
atatgaaaatttaaaagaagg

SEQ ID NO: 309814 - DNA, 21 bp, Artificial sequence
  SiRNA target sequence
tatgaaaatttaaaagaaggt

SEQ ID NO: 309815 - DNA, 21 bp, Artificial sequence
  SiRNA target sequence
atgaaaatttaaaagaaggtg

SEQ ID NO: 309816 - DNA, 21 bp, Artificial sequence
  SiRNA target sequence
tgaaaatttaaaagaaggtgg

SEQ ID NO: 309817 - DNA, 21 bp, Artificial sequence
  SiRNA target sequence
gaaaatttaaaagaaggtgga

SEQ ID NO: 309818 - DNA, 21 bp, Artificial sequence
  SiRNA target sequence
aaaatttaaaagaaggtggaa

SEQ ID NO: 309819 - DNA, 21 bp, Artificial sequence
  SiRNA target sequence
aaatttaaaagaaggtggaat

SEQ ID NO: 309820 - DNA, 21 bp, Artificial sequence
  SiRNA target sequence
aatttaaaagaaggtggaatt

SEQ ID NO: 309821 - DNA, 21 bp, Artificial sequence
  SiRNA target sequence
atttaaaagaaggtggaattt

SEQ ID NO: 309822 - DNA, 21 bp, Artificial sequence
  SiRNA target sequence
tttaaaagaaggtggaatttg

SEQ ID NO: 309823 - DNA, 21 bp, Artificial sequence
  SiRNA target sequence
ttaaaagaaggtggaatttgt

SEQ ID NO: 309824 - DNA, 21 bp, Artificial sequence
  SiRNA target sequence
taaaagaaggtggaatttgtg

SEQ ID NO: 309825 - DNA, 21 bp, Artificial sequence
  SiRNA target sequence
aaaagaaggtggaatttgtga

SEQ ID NO: 309826 - DNA, 21 bp, Artificial sequence
  SiRNA target sequence
aaagaaggtggaatttgtgaa

SEQ ID NO: 309827 - DNA, 21 bp, Artificial sequence
  SiRNA target sequence
aagaaggtggaatttgtgaat

SEQ ID NO: 309828 - DNA, 21 bp, Artificial sequence
  SiRNA target sequence
agaaggtggaatttgtgaatt

SEQ ID NO: 309829 - DNA, 21 bp, Artificial sequence
  SiRNA target sequence
gaaggtggaatttgtgaattt

SEQ ID NO: 309830 - DNA, 21 bp, Artificial sequence
  SiRNA target sequence
aaggtggaatttgtgaattta

SEQ ID NO: 309831 - DNA, 21 bp, Artificial sequence
  SiRNA target sequence
aggtggaatttgtgaatttat

SEQ ID NO: 309832 - DNA, 21 bp, Artificial sequence
  SiRNA target sequence
ggtggaatttgtgaatttatg

SEQ ID NO: 309833 - DNA, 21 bp, Artificial sequence
  SiRNA target sequence
gtggaatttgtgaatttatga

SEQ ID NO: 309834 - DNA, 21 bp, Artificial sequence
  SiRNA target sequence
tggaatttgtgaatttatgaa

SEQ ID NO: 309835 - DNA, 21 bp, Artificial sequence
  SiRNA target sequence
ggaatttgtgaatttatgaat

SEQ ID NO: 309836 - DNA, 21 bp, Artificial sequence
  SiRNA target sequence
  misc_feature (21)..(21): n is a, c, g, or t
gaatttgtgaatttatgaatn

SEQ ID NO: 309837 - DNA, 21 bp, Artificial sequence
  SiRNA target sequence
  misc_feature (20)..(20): n is a, c, g, or t
aatttgtgaatttatgaatng

SEQ ID NO: 309838 - DNA, 21 bp, Artificial sequence
  SiRNA target sequence
  misc_feature (19)..(19): n is a, c, g, or t
atttgtgaatttatgaatngt

SEQ ID NO: 309839 - DNA, 21 bp, Artificial sequence
  SiRNA target sequence
  misc_feature (18)..(18): n is a, c, g, or t
tttgtgaatttatgaatngtc

SEQ ID NO: 309840 - DNA, 21 bp, Artificial sequence
  SiRNA target sequence
  misc_feature (17)..(17): n is a, c, g, or t
ttgtgaatttatgaatngtcc

SEQ ID NO: 309841 - DNA, 21 bp, Artificial sequence
  SiRNA target sequence
  misc_feature (16)..(16): n is a, c, g, or t
tgtgaatttatgaatngtcca

SEQ ID NO: 309842 - DNA, 21 bp, Artificial sequence
  SiRNA target sequence
  misc_feature (15)..(15): n is a, c, g, or t
gtgaatttatgaatngtccag

SEQ ID NO: 309843 - DNA, 21 bp, Artificial sequence
  SiRNA target sequence
  misc_feature (14)..(14): n is a, c, g, or t
tgaatttatgaatngtccagc

SEQ ID NO: 309844 - DNA, 21 bp, Artificial sequence
  SiRNA target sequence
  misc_feature (13)..(13): n is a, c, g, or t
gaatttatgaatngtccagca

SEQ ID NO: 309845 - DNA, 21 bp, Artificial sequence
  SiRNA target sequence
  misc_feature (12)..(12): n is a, c, g, or t
aatttatgaatngtccagcaa

SEQ ID NO: 309846 - DNA, 21 bp, Artificial sequence
  SiRNA target sequence
  misc_feature (11)..(11): n is a, c, g, or t
atttatgaatngtccagcaat

SEQ ID NO: 309847 - DNA, 21 bp, Artificial sequence
  SiRNA target sequence
  misc_feature (10)..(10): n is a, c, g, or t
tttatgaatngtccagcaatt

SEQ ID NO: 309848 - DNA, 21 bp, Artificial sequence
  SiRNA target sequence
  misc_feature (9)..(9): n is a, c, g, or t
ttatgaatngtccagcaattt

SEQ ID NO: 309849 - DNA, 21 bp, Artificial sequence
  SiRNA target sequence
  misc_feature (8)..(8): n is a, c, g, or t
tatgaatngtccagcaatttc

SEQ ID NO: 309850 - DNA, 21 bp, Artificial sequence
  SiRNA target sequence
  misc_feature (7)..(7): n is a, c, g, or t
atgaatngtccagcaatttca

SEQ ID NO: 309851 - DNA, 21 bp, Artificial sequence
  SiRNA target sequence
  misc_feature (6)..(6): n is a, c, g, or t
tgaatngtccagcaatttcat

SEQ ID NO: 309852 - DNA, 21 bp, Artificial sequence
  SiRNA target sequence
  misc_feature (5)..(5): n is a, c, g, or t
gaatngtccagcaatttcata

SEQ ID NO: 309853 - DNA, 21 bp, Artificial sequence
  SiRNA target sequence
  misc_feature (4)..(4): n is a, c, g, or t
aatngtccagcaatttcatat

SEQ ID NO: 309854 - DNA, 21 bp, Artificial sequence
  SiRNA target sequence
  misc_feature (3)..(3): n is a, c, g, or t
atngtccagcaatttcatatc

SEQ ID NO: 309855 - DNA, 21 bp, Artificial sequence
  SiRNA target sequence
  misc_feature (2)..(2): n is a, c, g, or t
tngtccagcaatttcatatcc

SEQ ID NO: 309856 - DNA, 21 bp, Artificial sequence
  SiRNA target sequence
  misc_feature (1)..(1): n is a, c, g, or t
ngtccagcaatttcatatcca

SEQ ID NO: 309857 - DNA, 21 bp, Artificial sequence
  SiRNA target sequence
gtccagcaatttcatatccaa

SEQ ID NO: 309858 - DNA, 21 bp, Artificial sequence
  SiRNA target sequence
tccagcaatttcatatccaaa

SEQ ID NO: 309859 - DNA, 21 bp, Artificial sequence
  SiRNA target sequence
ccagcaatttcatatccaaag

SEQ ID NO: 309860 - DNA, 21 bp, Artificial sequence
  SiRNA target sequence
  misc_feature (21)..(21): n is a, c, g, or t
cagcaatttcatatccaaagn

SEQ ID NO: 309861 - DNA, 21 bp, Artificial sequence
  SiRNA target sequence
  misc_feature (20)..(20): n is a, c, g, or t
agcaatttcatatccaaagna

SEQ ID NO: 309862 - DNA, 21 bp, Artificial sequence
  SiRNA target sequence
  misc_feature (19)..(19): n is a, c, g, or t
gcaatttcatatccaaagnaa

SEQ ID NO: 309863 - DNA, 21 bp, Artificial sequence
  SiRNA target sequence
  misc_feature (18)..(18): n is a, c, g, or t
caatttcatatccaaagnaat

SEQ ID NO: 309864 - DNA, 21 bp, Artificial sequence
  SiRNA target sequence
  misc_feature (17)..(17): n is a, c, g, or t
aatttcatatccaaagnaata

SEQ ID NO: 309865 - DNA, 21 bp, Artificial sequence
  SiRNA target sequence
  misc_feature (16)..(16): n is a, c, g, or t
atttcatatccaaagnaatat

SEQ ID NO: 309866 - DNA, 21 bp, Artificial sequence
  SiRNA target sequence
  misc_feature (15)..(15): n is a, c, g, or t
tttcatatccaaagnaatatt

SEQ ID NO: 309867 - DNA, 21 bp, Artificial sequence
  SiRNA target sequence
  misc_feature (14)..(14): n is a, c, g, or t
ttcatatccaaagnaatattg

SEQ ID NO: 309868 - DNA, 21 bp, Artificial sequence
  SiRNA target sequence
  misc_feature (13)..(13): n is a, c, g, or t
tcatatccaaagnaatattgg

SEQ ID NO: 309869 - DNA, 21 bp, Artificial sequence
  SiRNA target sequence
  misc_feature (12)..(12): n is a, c, g, or t
catatccaaagnaatattgga

SEQ ID NO: 309870 - DNA, 21 bp, Artificial sequence
  SiRNA target sequence
  misc_feature (11)..(11): n is a, c, g, or t
atatccaaagnaatattggac

SEQ ID NO: 309871 - DNA, 21 bp, Artificial sequence
  SiRNA target sequence
  misc_feature (10)..(10): n is a, c, g, or t
tatccaaagnaatattggaca

SEQ ID NO: 309872 - DNA, 21 bp, Artificial sequence
  SiRNA target sequence
  misc_feature (9)..(9): n is a, c, g, or t
atccaaagnaatattggacag

SEQ ID NO: 309873 - DNA, 21 bp, Artificial sequence
  SiRNA target sequence
  misc_feature (8)..(8): n is a, c, g, or t
tccaaagnaatattggacagg

SEQ ID NO: 309874 - DNA, 21 bp, Artificial sequence
  SiRNA target sequence
  misc_feature (7)..(7): n is a, c, g, or t
ccaaagnaatattggacagga

SEQ ID NO: 309875 - DNA, 21 bp, Artificial sequence
  SiRNA target sequence
  misc_feature (6)..(6): n is a, c, g, or t
caaagnaatattggacaggaa

SEQ ID NO: 309876 - DNA, 21 bp, Artificial sequence
  SiRNA target sequence
  misc_feature (5)..(5): n is a, c, g, or t
aaagnaatattggacaggaaa

SEQ ID NO: 309877 - DNA, 21 bp, Artificial sequence
  SiRNA target sequence
  misc_feature (4)..(4): n is a, c, g, or t
aagnaatattggacaggaaaa

SEQ ID NO: 309878 - DNA, 21 bp, Artificial sequence
  SiRNA target sequence
  misc_feature (3)..(3): n is a, c, g, or t
agnaatattggacaggaaaac

SEQ ID NO: 309879 - DNA, 21 bp, Artificial sequence
  SiRNA target sequence
  misc_feature (2)..(2): n is a, c, g, or t
gnaatattggacaggaaaaca

SEQ ID NO: 309880 - DNA, 21 bp, Artificial sequence
  SiRNA target sequence
  misc_feature (1)..(1): n is a, c, g, or t
naatattggacaggaaaacaa

SEQ ID NO: 309881 - DNA, 21 bp, Artificial sequence
  SiRNA target sequence
aatattggacaggaaaacaaa

SEQ ID NO: 309882 - DNA, 21 bp, Artificial sequence
  SiRNA target sequence
atattggacaggaaaacaaat

SEQ ID NO: 309883 - DNA, 21 bp, Artificial sequence
  SiRNA target sequence
tattggacaggaaaacaaatt

SEQ ID NO: 309884 - DNA, 21 bp, Artificial sequence
  SiRNA target sequence
attggacaggaaaacaaatta

SEQ ID NO: 309885 - DNA, 21 bp, Artificial sequence
  SiRNA target sequence
ttggacaggaaaacaaattat

SEQ ID NO: 309886 - DNA, 21 bp, Artificial sequence
  SiRNA target sequence
tggacaggaaaacaaattatc

SEQ ID NO: 309887 - DNA, 21 bp, Artificial sequence
  SiRNA target sequence
ggacaggaaaacaaattatca

SEQ ID NO: 309888 - DNA, 21 bp, Artificial sequence
  SiRNA target sequence
gacaggaaaacaaattatcag

SEQ ID NO: 309889 - DNA, 21 bp, Artificial sequence
  SiRNA target sequence
acaggaaaacaaattatcagt

SEQ ID NO: 309890 - DNA, 21 bp, Artificial sequence
  SiRNA target sequence
caggaaaacaaattatcagtt

SEQ ID NO: 309891 - DNA, 21 bp, Artificial sequence
  SiRNA target sequence
aggaaaacaaattatcagttt

SEQ ID NO: 309892 - DNA, 21 bp, Artificial sequence
  SiRNA target sequence
ggaaaacaaattatcagtttt

SEQ ID NO: 309893 - DNA, 21 bp, Artificial sequence
  SiRNA target sequence
gaaaacaaattatcagtttta

SEQ ID NO: 309894 - DNA, 21 bp, Artificial sequence
  SiRNA target sequence
aaaacaaattatcagttttat

SEQ ID NO: 309895 - DNA, 21 bp, Artificial sequence
  SiRNA target sequence
aaacaaattatcagttttatt

SEQ ID NO: 309896 - DNA, 21 bp, Artificial sequence
  SiRNA target sequence
aacaaattatcagttttattt

SEQ ID NO: 309897 - DNA, 21 bp, Artificial sequence
  SiRNA target sequence
acaaattatcagttttatttt

SEQ ID NO: 309898 - DNA, 21 bp, Artificial sequence
  SiRNA target sequence
caaattatcagttttatttta

SEQ ID NO: 309899 - DNA, 21 bp, Artificial sequence
  SiRNA target sequence
aaattatcagttttattttac

SEQ ID NO: 309900 - DNA, 21 bp, Artificial sequence
  SiRNA target sequence
aattatcagttttattttacc

SEQ ID NO: 309901 - DNA, 21 bp, Artificial sequence
  SiRNA target sequence
attatcagttttattttacct

SEQ ID NO: 309902 - DNA, 21 bp, Artificial sequence
  SiRNA target sequence
ttatcagttttattttacctg

SEQ ID NO: 309903 - DNA, 21 bp, Artificial sequence
  SiRNA target sequence
tatcagttttattttacctga

SEQ ID NO: 309904 - DNA, 21 bp, Artificial sequence
  SiRNA target sequence
atcagttttattttacctgat

SEQ ID NO: 309905 - DNA, 21 bp, Artificial sequence
  SiRNA target sequence
tcagttttattttacctgata

SEQ ID NO: 309906 - DNA, 21 bp, Artificial sequence
  SiRNA target sequence
cagttttattttacctgatat

SEQ ID NO: 309907 - DNA, 21 bp, Artificial sequence
  SiRNA target sequence
agttttattttacctgatata

SEQ ID NO: 309908 - DNA, 21 bp, Artificial sequence
  SiRNA target sequence
gttttattttacctgatataa

SEQ ID NO: 309909 - DNA, 21 bp, Artificial sequence
  SiRNA target sequence
ttttattttacctgatataat

SEQ ID NO: 309910 - DNA, 21 bp, Artificial sequence
  SiRNA target sequence
tttattttacctgatataatt

SEQ ID NO: 309911 - DNA, 21 bp, Artificial sequence
  SiRNA target sequence
ttattttacctgatataattt

SEQ ID NO: 309912 - DNA, 21 bp, Artificial sequence
  SiRNA target sequence
tattttacctgatataatttt

SEQ ID NO: 309913 - DNA, 21 bp, Artificial sequence
  SiRNA target sequence
attttacctgatataattttt

SEQ ID NO: 309914 - DNA, 21 bp, Artificial sequence
  SiRNA target sequence
ttttacctgatataattttta

SEQ ID NO: 309915 - DNA, 21 bp, Artificial sequence
  SiRNA target sequence
tttacctgatataatttttaa

SEQ ID NO: 309916 - DNA, 21 bp, Artificial sequence
  SiRNA target sequence
ttacctgatataatttttaat

SEQ ID NO: 309917 - DNA, 21 bp, Artificial sequence
  SiRNA target sequence
tacctgatataatttttaatg

SEQ ID NO: 309918 - DNA, 21 bp, Artificial sequence
  SiRNA target sequence
acctgatataatttttaatgg

SEQ ID NO: 309919 - DNA, 21 bp, Artificial sequence
  SiRNA target sequence
cctgatataatttttaatgga

SEQ ID NO: 309920 - DNA, 21 bp, Artificial sequence
  SiRNA target sequence
ctgatataatttttaatggaa

SEQ ID NO: 309921 - DNA, 21 bp, Artificial sequence
  SiRNA target sequence
tgatataatttttaatggaaa

SEQ ID NO: 309922 - DNA, 21 bp, Artificial sequence
  SiRNA target sequence
gatataatttttaatggaaat

SEQ ID NO: 309923 - DNA, 21 bp, Artificial sequence
  SiRNA target sequence
atataatttttaatggaaatt

SEQ ID NO: 309924 - DNA, 21 bp, Artificial sequence
  SiRNA target sequence
tataatttttaatggaaattc

SEQ ID NO: 309925 - DNA, 21 bp, Artificial sequence
  SiRNA target sequence
ataatttttaatggaaattca

SEQ ID NO: 309926 - DNA, 21 bp, Artificial sequence
  SiRNA target sequence
taatttttaatggaaattcaa

SEQ ID NO: 309927 - DNA, 21 bp, Artificial sequence
  SiRNA target sequence
aatttttaatggaaattcaaa

SEQ ID NO: 309928 - DNA, 21 bp, Artificial sequence
  SiRNA target sequence
atttttaatggaaattcaaat

SEQ ID NO: 309929 - DNA, 21 bp, Artificial sequence
  SiRNA target sequence
tttttaatggaaattcaaatg

SEQ ID NO: 309930 - DNA, 21 bp, Artificial sequence
  SiRNA target sequence
ttttaatggaaattcaaatga

SEQ ID NO: 309931 - DNA, 21 bp, Artificial sequence
  SiRNA target sequence
tttaatggaaattcaaatgaa

SEQ ID NO: 309932 - DNA, 21 bp, Artificial sequence
  SiRNA target sequence
ttaatggaaattcaaatgaat

SEQ ID NO: 309933 - DNA, 21 bp, Artificial sequence
  SiRNA target sequence
taatggaaattcaaatgaatt

SEQ ID NO: 309934 - DNA, 21 bp, Artificial sequence
  SiRNA target sequence
aatggaaattcaaatgaattt

SEQ ID NO: 309935 - DNA, 21 bp, Artificial sequence
  SiRNA target sequence
atggaaattcaaatgaatttg

SEQ ID NO: 309936 - DNA, 21 bp, Artificial sequence
  SiRNA target sequence
tggaaattcaaatgaatttga

SEQ ID NO: 309937 - DNA, 21 bp, Artificial sequence
  SiRNA target sequence
ggaaattcaaatgaatttgat

SEQ ID NO: 309938 - DNA, 21 bp, Artificial sequence
  SiRNA target sequence
gaaattcaaatgaatttgatg

SEQ ID NO: 309939 - DNA, 21 bp, Artificial sequence
  SiRNA target sequence
aaattcaaatgaatttgatga

SEQ ID NO: 309940 - DNA, 21 bp, Artificial sequence
  SiRNA target sequence
  misc_feature (21)..(21): n is a, c, g, or t
aattcaaatgaatttgatgan

SEQ ID NO: 309941 - DNA, 21 bp, Artificial sequence
  SiRNA target sequence
  misc_feature (20)..(20): n is a, c, g, or t
attcaaatgaatttgatgang

SEQ ID NO: 309942 - DNA, 21 bp, Artificial sequence
  SiRNA target sequence
  misc_feature (19)..(19): n is a, c, g, or t
ttcaaatgaatttgatganga

SEQ ID NO: 309943 - DNA, 21 bp, Artificial sequence
  SiRNA target sequence
  misc_feature (18)..(18): n is a, c, g, or t
tcaaatgaatttgatgangag

SEQ ID NO: 309944 - DNA, 21 bp, Artificial sequence
  SiRNA target sequence
  misc_feature (17)..(17): n is a, c, g, or t
caaatgaatttgatgangagg

SEQ ID NO: 309945 - DNA, 21 bp, Artificial sequence
  SiRNA target sequence
  misc_feature (16)..(16): n is a, c, g, or t
aaatgaatttgatgangagga

SEQ ID NO: 309946 - DNA, 21 bp, Artificial sequence
  SiRNA target sequence
  misc_feature (15)..(15): n is a, c, g, or t
aatgaatttgatgangaggat

SEQ ID NO: 309947 - DNA, 21 bp, Artificial sequence
  SiRNA target sequence
  misc_feature (14)..(14): n is a, c, g, or t
atgaatttgatgangaggatt

SEQ ID NO: 309948 - DNA, 21 bp, Artificial sequence
  SiRNA target sequence
  misc_feature (13)..(13): n is a, c, g, or t
tgaatttgatgangaggattt

SEQ ID NO: 309949 - DNA, 21 bp, Artificial sequence
  SiRNA target sequence
  misc_feature (12)..(12): n is a, c, g, or t
gaatttgatgangaggattta

SEQ ID NO: 309950 - DNA, 21 bp, Artificial sequence
  SiRNA target sequence
  misc_feature (11)..(11): n is a, c, g, or t
aatttgatgangaggatttag

SEQ ID NO: 309951 - DNA, 21 bp, Artificial sequence
  SiRNA target sequence
  misc_feature (10)..(10): n is a, c, g, or t
atttgatgangaggatttaga

SEQ ID NO: 309952 - DNA, 21 bp, Artificial sequence
  SiRNA target sequence
  misc_feature (9)..(9): n is a, c, g, or t
tttgatgangaggatttagaa

SEQ ID NO: 309953 - DNA, 21 bp, Artificial sequence
  SiRNA target sequence
  misc_feature (8)..(8): n is a, c, g, or t
ttgatgangaggatttagaaa

SEQ ID NO: 309954 - DNA, 21 bp, Artificial sequence
  SiRNA target sequence
  misc_feature (7)..(7): n is a, c, g, or t
tgatgangaggatttagaaaa

SEQ ID NO: 309955 - DNA, 21 bp, Artificial sequence
  SiRNA target sequence
  misc_feature (6)..(6): n is a, c, g, or t
gatgangaggatttagaaaat

SEQ ID NO: 309956 - DNA, 21 bp, Artificial sequence
  SiRNA target sequence
  misc_feature (5)..(5): n is a, c, g, or t
atgangaggatttagaaaatg

SEQ ID NO: 309957 - DNA, 21 bp, Artificial sequence
  SiRNA target sequence
  misc_feature (4)..(4): n is a, c, g, or t
tgangaggatttagaaaatgt

SEQ ID NO: 309958 - DNA, 21 bp, Artificial sequence
  SiRNA target sequence
  misc_feature (3)..(3): n is a, c, g, or t
gangaggatttagaaaatgtt

SEQ ID NO: 309959 - DNA, 21 bp, Artificial sequence
  SiRNA target sequence
  misc_feature (2)..(2): n is a, c, g, or t
angaggatttagaaaatgtta

SEQ ID NO: 309960 - DNA, 21 bp, Artificial sequence
  SiRNA target sequence
  misc_feature (1)..(1): n is a, c, g, or t
ngaggatttagaaaatgttaa

SEQ ID NO: 309961 - DNA, 21 bp, Artificial sequence
  SiRNA target sequence
gaggatttagaaaatgttaaa

SEQ ID NO: 309962 - DNA, 21 bp, Artificial sequence
  SiRNA target sequence
aggatttagaaaatgttaaag

SEQ ID NO: 309963 - DNA, 21 bp, Artificial sequence
  SiRNA target sequence
ggatttagaaaatgttaaaga

SEQ ID NO: 309964 - DNA, 21 bp, Artificial sequence
  SiRNA target sequence
gatttagaaaatgttaaagat

SEQ ID NO: 309965 - DNA, 21 bp, Artificial sequence
  SiRNA target sequence
atttagaaaatgttaaagatt

SEQ ID NO: 309966 - DNA, 21 bp, Artificial sequence
  SiRNA target sequence
tttagaaaatgttaaagattt

SEQ ID NO: 309967 - DNA, 21 bp, Artificial sequence
  SiRNA target sequence
ttagaaaatgttaaagattta

SEQ ID NO: 309968 - DNA, 21 bp, Artificial sequence
  SiRNA target sequence
tagaaaatgttaaagatttaa

SEQ ID NO: 309969 - DNA, 21 bp, Artificial sequence
  SiRNA target sequence
agaaaatgttaaagatttaaa

SEQ ID NO: 309970 - DNA, 21 bp, Artificial sequence
  SiRNA target sequence
gaaaatgttaaagatttaaaa

SEQ ID NO: 309971 - DNA, 21 bp, Artificial sequence
  SiRNA target sequence
aaaatgttaaagatttaaaaa

SEQ ID NO: 309972 - DNA, 21 bp, Artificial sequence
  SiRNA target sequence
aaatgttaaagatttaaaaat

SEQ ID NO: 309973 - DNA, 21 bp, Artificial sequence
  SiRNA target sequence
aatgttaaagatttaaaaatt

SEQ ID NO: 309974 - DNA, 21 bp, Artificial sequence
  SiRNA target sequence
atgttaaagatttaaaaattt

SEQ ID NO: 309975 - DNA, 21 bp, Artificial sequence
  SiRNA target sequence
tgttaaagatttaaaaattta

SEQ ID NO: 309976 - DNA, 21 bp, Artificial sequence
  SiRNA target sequence
gttaaagatttaaaaatttat

SEQ ID NO: 309977 - DNA, 21 bp, Artificial sequence
  SiRNA target sequence
ttaaagatttaaaaatttatt

SEQ ID NO: 309978 - DNA, 21 bp, Artificial sequence
  SiRNA target sequence
taaagatttaaaaatttattt

SEQ ID NO: 309979 - DNA, 21 bp, Artificial sequence
  SiRNA target sequence
aaagatttaaaaatttattta

SEQ ID NO: 309980 - DNA, 21 bp, Artificial sequence
  SiRNA target sequence
aagatttaaaaatttatttaa

SEQ ID NO: 309981 - DNA, 21 bp, Artificial sequence
  SiRNA target sequence
agatttaaaaatttatttaag

SEQ ID NO: 309982 - DNA, 21 bp, Artificial sequence
  SiRNA target sequence
gatttaaaaatttatttaaga

SEQ ID NO: 309983 - DNA, 21 bp, Artificial sequence
  SiRNA target sequence
atttaaaaatttatttaagaa

SEQ ID NO: 309984 - DNA, 21 bp, Artificial sequence
  SiRNA target sequence
tttaaaaatttatttaagaaa

SEQ ID NO: 309985 - DNA, 21 bp, Artificial sequence
  SiRNA target sequence
ttaaaaatttatttaagaaac

SEQ ID NO: 309986 - DNA, 21 bp, Artificial sequence
  SiRNA target sequence
taaaaatttatttaagaaacg

SEQ ID NO: 309987 - DNA, 21 bp, Artificial sequence
  SiRNA target sequence
aaaaatttatttaagaaacgg

SEQ ID NO: 309988 - DNA, 21 bp, Artificial sequence
  SiRNA target sequence
aaaatttatttaagaaacgga

SEQ ID NO: 309989 - DNA, 21 bp, Artificial sequence
  SiRNA target sequence
aaatttatttaagaaacggag

SEQ ID NO: 309990 - DNA, 21 bp, Artificial sequence
  SiRNA target sequence
aatttatttaagaaacggaga

SEQ ID NO: 309991 - DNA, 21 bp, Artificial sequence
  SiRNA target sequence
atttatttaagaaacggagaa

SEQ ID NO: 309992 - DNA, 21 bp, Artificial sequence
  SiRNA target sequence
tttatttaagaaacggagaac

SEQ ID NO: 309993 - DNA, 21 bp, Artificial sequence
  SiRNA target sequence
ttatttaagaaacggagaact

SEQ ID NO: 309994 - DNA, 21 bp, Artificial sequence
  SiRNA target sequence
tatttaagaaacggagaactt

SEQ ID NO: 309995 - DNA, 21 bp, Artificial sequence
  SiRNA target sequence
atttaagaaacggagaacttt

SEQ ID NO: 309996 - DNA, 21 bp, Artificial sequence
  SiRNA target sequence
tttaagaaacggagaactttt

SEQ ID NO: 309997 - DNA, 21 bp, Artificial sequence
  SiRNA target sequence
ttaagaaacggagaactttta

SEQ ID NO: 309998 - DNA, 21 bp, Artificial sequence
  SiRNA target sequence
taagaaacggagaacttttat

SEQ ID NO: 309999 - DNA, 21 bp, Artificial sequence
  SiRNA target sequence
aagaaacggagaacttttatc

SEQ ID NO: 310000 - DNA, 21 bp, Artificial sequence
  SiRNA target sequence
agaaacggagaacttttatct

SEQ ID NO: 310001 - DNA, 21 bp, Artificial sequence
  SiRNA target sequence
gaaacggagaacttttatctg

SEQ ID NO: 310002 - DNA, 21 bp, Artificial sequence
  SiRNA target sequence
aaacggagaacttttatctgg

SEQ ID NO: 310003 - DNA, 21 bp, Artificial sequence
  SiRNA target sequence
aacggagaacttttatctgga

SEQ ID NO: 310004 - DNA, 21 bp, Artificial sequence
  SiRNA target sequence
acggagaacttttatctggaa

SEQ ID NO: 310005 - DNA, 21 bp, Artificial sequence
  SiRNA target sequence
cggagaacttttatctggaat

SEQ ID NO: 310006 - DNA, 21 bp, Artificial sequence
  SiRNA target sequence
ggagaacttttatctggaatt

SEQ ID NO: 310007 - DNA, 21 bp, Artificial sequence
  SiRNA target sequence
gagaacttttatctggaattt

SEQ ID NO: 310008 - DNA, 21 bp, Artificial sequence
  SiRNA target sequence
agaacttttatctggaatttt

SEQ ID NO: 310009 - DNA, 21 bp, Artificial sequence
  SiRNA target sequence
gaacttttatctggaatttta

SEQ ID NO: 310010 - DNA, 21 bp, Artificial sequence
  SiRNA target sequence
aacttttatctggaattttag

SEQ ID NO: 310011 - DNA, 21 bp, Artificial sequence
  SiRNA target sequence
acttttatctggaattttaga

SEQ ID NO: 310012 - DNA, 21 bp, Artificial sequence
  SiRNA target sequence
cttttatctggaattttagac

SEQ ID NO: 310013 - DNA, 21 bp, Artificial sequence
  SiRNA target sequence
ttttatctggaattttagaca

SEQ ID NO: 310014 - DNA, 21 bp, Artificial sequence
  SiRNA target sequence
tttatctggaattttagacaa

SEQ ID NO: 310015 - DNA, 21 bp, Artificial sequence
  SiRNA target sequence
ttatctggaattttagacaaa

SEQ ID NO: 310016 - DNA, 21 bp, Artificial sequence
  SiRNA target sequence
tatctggaattttagacaaaa

SEQ ID NO: 310017 - DNA, 21 bp, Artificial sequence
  SiRNA target sequence
atctggaattttagacaaaaa

SEQ ID NO: 310018 - DNA, 21 bp, Artificial sequence
  SiRNA target sequence
tctggaattttagacaaaaaa

SEQ ID NO: 310019 - DNA, 21 bp, Artificial sequence
  SiRNA target sequence
ctggaattttagacaaaaaaa

SEQ ID NO: 310020 - DNA, 21 bp, Artificial sequence
  SiRNA target sequence
tggaattttagacaaaaaaac

SEQ ID NO: 310021 - DNA, 21 bp, Artificial sequence
  SiRNA target sequence
ggaattttagacaaaaaaact

SEQ ID NO: 310022 - DNA, 21 bp, Artificial sequence
  SiRNA target sequence
gaattttagacaaaaaaactg

SEQ ID NO: 310023 - DNA, 21 bp, Artificial sequence
  SiRNA target sequence
aattttagacaaaaaaactgt

SEQ ID NO: 310024 - DNA, 21 bp, Artificial sequence
  SiRNA target sequence
attttagacaaaaaaactgtc

SEQ ID NO: 310025 - DNA, 21 bp, Artificial sequence
  SiRNA target sequence
ttttagacaaaaaaactgtcg

SEQ ID NO: 310026 - DNA, 21 bp, Artificial sequence
  SiRNA target sequence
tttagacaaaaaaactgtcgg

SEQ ID NO: 310027 - DNA, 21 bp, Artificial sequence
  SiRNA target sequence
ttagacaaaaaaactgtcggt

SEQ ID NO: 310028 - DNA, 21 bp, Artificial sequence
  SiRNA target sequence
tagacaaaaaaactgtcggtg

SEQ ID NO: 310029 - DNA, 21 bp, Artificial sequence
  SiRNA target sequence
agacaaaaaaactgtcggtgc

SEQ ID NO: 310030 - DNA, 21 bp, Artificial sequence
  SiRNA target sequence
gacaaaaaaactgtcggtgct

SEQ ID NO: 310031 - DNA, 21 bp, Artificial sequence
  SiRNA target sequence
acaaaaaaactgtcggtgcta

SEQ ID NO: 310032 - DNA, 21 bp, Artificial sequence
  SiRNA target sequence
caaaaaaactgtcggtgctac

SEQ ID NO: 310033 - DNA, 21 bp, Artificial sequence
  SiRNA target sequence
aaaaaaactgtcggtgctaca

SEQ ID NO: 310034 - DNA, 21 bp, Artificial sequence
  SiRNA target sequence
aaaaaactgtcggtgctacac

SEQ ID NO: 310035 - DNA, 21 bp, Artificial sequence
  SiRNA target sequence
aaaaactgtcggtgctacaca

SEQ ID NO: 310036 - DNA, 21 bp, Artificial sequence
  SiRNA target sequence
aaaactgtcggtgctacacaa

SEQ ID NO: 310037 - DNA, 21 bp, Artificial sequence
  SiRNA target sequence
aaactgtcggtgctacacaag

SEQ ID NO: 310038 - DNA, 21 bp, Artificial sequence
  SiRNA target sequence
aactgtcggtgctacacaagg

SEQ ID NO: 310039 - DNA, 21 bp, Artificial sequence
  SiRNA target sequence
actgtcggtgctacacaaggt

SEQ ID NO: 310040 - DNA, 21 bp, Artificial sequence
  SiRNA target sequence
ctgtcggtgctacacaaggtg

SEQ ID NO: 310041 - DNA, 21 bp, Artificial sequence
  SiRNA target sequence
tgtcggtgctacacaaggtgg

SEQ ID NO: 310042 - DNA, 21 bp, Artificial sequence
  SiRNA target sequence
gtcggtgctacacaaggtggt

SEQ ID NO: 310043 - DNA, 21 bp, Artificial sequence
  SiRNA target sequence
tcggtgctacacaaggtggtt

SEQ ID NO: 310044 - DNA, 21 bp, Artificial sequence
  SiRNA target sequence
cggtgctacacaaggtggttt

SEQ ID NO: 310045 - DNA, 21 bp, Artificial sequence
  SiRNA target sequence
ggtgctacacaaggtggtttt

SEQ ID NO: 310046 - DNA, 21 bp, Artificial sequence
  SiRNA target sequence
gtgctacacaaggtggtttta

SEQ ID NO: 310047 - DNA, 21 bp, Artificial sequence
  SiRNA target sequence
tgctacacaaggtggttttat

SEQ ID NO: 310048 - DNA, 21 bp, Artificial sequence
  SiRNA target sequence
gctacacaaggtggttttatt

SEQ ID NO: 310049 - DNA, 21 bp, Artificial sequence
  SiRNA target sequence
ctacacaaggtggttttattc

SEQ ID NO: 310050 - DNA, 21 bp, Artificial sequence
  SiRNA target sequence
tacacaaggtggttttattca

SEQ ID NO: 310051 - DNA, 21 bp, Artificial sequence
  SiRNA target sequence
acacaaggtggttttattcat

SEQ ID NO: 310052 - DNA, 21 bp, Artificial sequence
  SiRNA target sequence
cacaaggtggttttattcata

SEQ ID NO: 310053 - DNA, 21 bp, Artificial sequence
  SiRNA target sequence
acaaggtggttttattcatat

SEQ ID NO: 310054 - DNA, 21 bp, Artificial sequence
  SiRNA target sequence
caaggtggttttattcatata

SEQ ID NO: 310055 - DNA, 21 bp, Artificial sequence
  SiRNA target sequence
aaggtggttttattcatataa

SEQ ID NO: 310056 - DNA, 21 bp, Artificial sequence
  SiRNA target sequence
aggtggttttattcatataat

SEQ ID NO: 310057 - DNA, 21 bp, Artificial sequence
  SiRNA target sequence
ggtggttttattcatataatt

SEQ ID NO: 310058 - DNA, 21 bp, Artificial sequence
  SiRNA target sequence
gtggttttattcatataattg

SEQ ID NO: 310059 - DNA, 21 bp, Artificial sequence
  SiRNA target sequence
tggttttattcatataattgc

SEQ ID NO: 310060 - DNA, 21 bp, Artificial sequence
  SiRNA target sequence
ggttttattcatataattgca

SEQ ID NO: 310061 - DNA, 21 bp, Artificial sequence
  SiRNA target sequence
gttttattcatataattgcaa

SEQ ID NO: 310062 - DNA, 21 bp, Artificial sequence
  SiRNA target sequence
ttttattcatataattgcaaa

SEQ ID NO: 310063 - DNA, 21 bp, Artificial sequence
  SiRNA target sequence
tttattcatataattgcaaat

SEQ ID NO: 310064 - DNA, 21 bp, Artificial sequence
  SiRNA target sequence
ttattcatataattgcaaatg

SEQ ID NO: 310065 - DNA, 21 bp, Artificial sequence
  SiRNA target sequence
tattcatataattgcaaatga

SEQ ID NO: 310066 - DNA, 21 bp, Artificial sequence
  SiRNA target sequence
attcatataattgcaaatgat

SEQ ID NO: 310067 - DNA, 21 bp, Artificial sequence
  SiRNA target sequence
ttcatataattgcaaatgatt

SEQ ID NO: 310068 - DNA, 21 bp, Artificial sequence
  SiRNA target sequence
tcatataattgcaaatgattt

SEQ ID NO: 310069 - DNA, 21 bp, Artificial sequence
  SiRNA target sequence
catataattgcaaatgatttt

SEQ ID NO: 310070 - DNA, 21 bp, Artificial sequence
  SiRNA target sequence
atataattgcaaatgattttg

SEQ ID NO: 310071 - DNA, 21 bp, Artificial sequence
  SiRNA target sequence
tataattgcaaatgattttgg

SEQ ID NO: 310072 - DNA, 21 bp, Artificial sequence
  SiRNA target sequence
ataattgcaaatgattttgga

SEQ ID NO: 310073 - DNA, 21 bp, Artificial sequence
  SiRNA target sequence
taattgcaaatgattttggat

SEQ ID NO: 310074 - DNA, 21 bp, Artificial sequence
  SiRNA target sequence
aattgcaaatgattttggatc

SEQ ID NO: 310075 - DNA, 21 bp, Artificial sequence
  SiRNA target sequence
attgcaaatgattttggatct

SEQ ID NO: 310076 - DNA, 21 bp, Artificial sequence
  SiRNA target sequence
ttgcaaatgattttggatctg

SEQ ID NO: 310077 - DNA, 21 bp, Artificial sequence
  SiRNA target sequence
tgcaaatgattttggatctga

SEQ ID NO: 310078 - DNA, 21 bp, Artificial sequence
  SiRNA target sequence
gcaaatgattttggatctgaa

SEQ ID NO: 310079 - DNA, 21 bp, Artificial sequence
  SiRNA target sequence
caaatgattttggatctgaac

SEQ ID NO: 310080 - DNA, 21 bp, Artificial sequence
  SiRNA target sequence
aaatgattttggatctgaacg

SEQ ID NO: 310081 - DNA, 21 bp, Artificial sequence
  SiRNA target sequence
aatgattttggatctgaacgc

SEQ ID NO: 310082 - DNA, 21 bp, Artificial sequence
  SiRNA target sequence
atgattttggatctgaacgcg

SEQ ID NO: 310083 - DNA, 21 bp, Artificial sequence
  SiRNA target sequence
tgattttggatctgaacgcgt

SEQ ID NO: 310084 - DNA, 21 bp, Artificial sequence
  SiRNA target sequence
gattttggatctgaacgcgtc

SEQ ID NO: 310085 - DNA, 21 bp, Artificial sequence
  SiRNA target sequence
attttggatctgaacgcgtca

SEQ ID NO: 310086 - DNA, 21 bp, Artificial sequence
  SiRNA target sequence
ttttggatctgaacgcgtcac

SEQ ID NO: 310087 - DNA, 21 bp, Artificial sequence
  SiRNA target sequence
tttggatctgaacgcgtcact

SEQ ID NO: 310088 - DNA, 21 bp, Artificial sequence
  SiRNA target sequence
ttggatctgaacgcgtcactg

SEQ ID NO: 310089 - DNA, 21 bp, Artificial sequence
  SiRNA target sequence
tggatctgaacgcgtcactgc

SEQ ID NO: 310090 - DNA, 21 bp, Artificial sequence
  SiRNA target sequence
ggatctgaacgcgtcactgca

SEQ ID NO: 310091 - DNA, 21 bp, Artificial sequence
  SiRNA target sequence
gatctgaacgcgtcactgcat

SEQ ID NO: 310092 - DNA, 21 bp, Artificial sequence
  SiRNA target sequence
atctgaacgcgtcactgcatt

SEQ ID NO: 310093 - DNA, 21 bp, Artificial sequence
  SiRNA target sequence
tctgaacgcgtcactgcattt

SEQ ID NO: 310094 - DNA, 21 bp, Artificial sequence
  SiRNA target sequence
ctgaacgcgtcactgcatttt

SEQ ID NO: 310095 - DNA, 21 bp, Artificial sequence
  SiRNA target sequence
tgaacgcgtcactgcattttt

SEQ ID NO: 310096 - DNA, 21 bp, Artificial sequence
  SiRNA target sequence
gaacgcgtcactgcatttttt

SEQ ID NO: 310097 - DNA, 21 bp, Artificial sequence
  SiRNA target sequence
aacgcgtcactgcattttttg

SEQ ID NO: 310098 - DNA, 21 bp, Artificial sequence
  SiRNA target sequence
acgcgtcactgcattttttga

SEQ ID NO: 310099 - DNA, 21 bp, Artificial sequence
  SiRNA target sequence
cgcgtcactgcattttttgat

SEQ ID NO: 310100 - DNA, 21 bp, Artificial sequence
  SiRNA target sequence
gcgtcactgcattttttgatg

SEQ ID NO: 310101 - DNA, 21 bp, Artificial sequence
  SiRNA target sequence
cgtcactgcattttttgatga

SEQ ID NO: 310102 - DNA, 21 bp, Artificial sequence
  SiRNA target sequence
gtcactgcattttttgatgac

SEQ ID NO: 310103 - DNA, 21 bp, Artificial sequence
  SiRNA target sequence
tcactgcattttttgatgacg

SEQ ID NO: 310104 - DNA, 21 bp, Artificial sequence
  SiRNA target sequence
cactgcattttttgatgacgt

SEQ ID NO: 310105 - DNA, 21 bp, Artificial sequence
  SiRNA target sequence
actgcattttttgatgacgtg

SEQ ID NO: 310106 - DNA, 21 bp, Artificial sequence
  SiRNA target sequence
ctgcattttttgatgacgtgc

SEQ ID NO: 310107 - DNA, 21 bp, Artificial sequence
  SiRNA target sequence
tgcattttttgatgacgtgca

SEQ ID NO: 310108 - DNA, 21 bp, Artificial sequence
  SiRNA target sequence
gcattttttgatgacgtgcaa

SEQ ID NO: 310109 - DNA, 21 bp, Artificial sequence
  SiRNA target sequence
cattttttgatgacgtgcaaa

SEQ ID NO: 310110 - DNA, 21 bp, Artificial sequence
  SiRNA target sequence
attttttgatgacgtgcaaaa

SEQ ID NO: 310111 - DNA, 21 bp, Artificial sequence
  SiRNA target sequence
ttttttgatgacgtgcaaaaa

SEQ ID NO: 310112 - DNA, 21 bp, Artificial sequence
  SiRNA target sequence
tttttgatgacgtgcaaaaat

SEQ ID NO: 310113 - DNA, 21 bp, Artificial sequence
  SiRNA target sequence
ttttgatgacgtgcaaaaatt

SEQ ID NO: 310114 - DNA, 21 bp, Artificial sequence
  SiRNA target sequence
tttgatgacgtgcaaaaattg

SEQ ID NO: 310115 - DNA, 21 bp, Artificial sequence
  SiRNA target sequence
ttgatgacgtgcaaaaattga

SEQ ID NO: 310116 - DNA, 21 bp, Artificial sequence
  SiRNA target sequence
tgatgacgtgcaaaaattgat

SEQ ID NO: 310117 - DNA, 21 bp, Artificial sequence
  SiRNA target sequence
gatgacgtgcaaaaattgatc

SEQ ID NO: 310118 - DNA, 21 bp, Artificial sequence
  SiRNA target sequence
atgacgtgcaaaaattgatca

SEQ ID NO: 310119 - DNA, 21 bp, Artificial sequence
  SiRNA target sequence
tgacgtgcaaaaattgatcaa

SEQ ID NO: 310120 - DNA, 21 bp, Artificial sequence
  SiRNA target sequence
gacgtgcaaaaattgatcaat

SEQ ID NO: 310121 - DNA, 21 bp, Artificial sequence
  SiRNA target sequence
acgtgcaaaaattgatcaata

SEQ ID NO: 310122 - DNA, 21 bp, Artificial sequence
  SiRNA target sequence
cgtgcaaaaattgatcaataa

SEQ ID NO: 310123 - DNA, 21 bp, Artificial sequence
  SiRNA target sequence
gtgcaaaaattgatcaataaa

SEQ ID NO: 310124 - DNA, 21 bp, Artificial sequence
  SiRNA target sequence
tgcaaaaattgatcaataaat

SEQ ID NO: 310125 - DNA, 21 bp, Artificial sequence
  SiRNA target sequence
gcaaaaattgatcaataaatt

SEQ ID NO: 310126 - DNA, 21 bp, Artificial sequence
  SiRNA target sequence
caaaaattgatcaataaattt

SEQ ID NO: 310127 - DNA, 21 bp, Artificial sequence
  SiRNA target sequence
aaaaattgatcaataaattta

SEQ ID NO: 310128 - DNA, 21 bp, Artificial sequence
  SiRNA target sequence
aaaattgatcaataaatttat

SEQ ID NO: 310129 - DNA, 21 bp, Artificial sequence
  SiRNA target sequence
aaattgatcaataaatttatt

SEQ ID NO: 310130 - DNA, 21 bp, Artificial sequence
  SiRNA target sequence
aattgatcaataaatttatta

SEQ ID NO: 310131 - DNA, 21 bp, Artificial sequence
  SiRNA target sequence
attgatcaataaatttattac

SEQ ID NO: 310132 - DNA, 21 bp, Artificial sequence
  SiRNA target sequence
ttgatcaataaatttattacg

SEQ ID NO: 310133 - DNA, 21 bp, Artificial sequence
  SiRNA target sequence
  misc_feature (21)..(21): n is a, c, g, or t
tgatcaataaatttattacgn

SEQ ID NO: 310134 - DNA, 21 bp, Artificial sequence
  SiRNA target sequence
  misc_feature (20)..(20): n is a, c, g, or t
gatcaataaatttattacgna

SEQ ID NO: 310135 - DNA, 21 bp, Artificial sequence
  SiRNA target sequence
  misc_feature (19)..(19): n is a, c, g, or t
atcaataaatttattacgnat

SEQ ID NO: 310136 - DNA, 21 bp, Artificial sequence
  SiRNA target sequence
  misc_feature (18)..(18): n is a, c, g, or t
tcaataaatttattacgnata

SEQ ID NO: 310137 - DNA, 21 bp, Artificial sequence
  SiRNA target sequence
  misc_feature (17)..(17): n is a, c, g, or t
caataaatttattacgnatat

SEQ ID NO: 310138 - DNA, 21 bp, Artificial sequence
  SiRNA target sequence
  misc_feature (16)..(16): n is a, c, g, or t
aataaatttattacgnatata

SEQ ID NO: 310139 - DNA, 21 bp, Artificial sequence
  SiRNA target sequence
  misc_feature (15)..(15): n is a, c, g, or t
ataaatttattacgnatataa

SEQ ID NO: 310140 - DNA, 21 bp, Artificial sequence
  SiRNA target sequence
  misc_feature (14)..(14): n is a, c, g, or t
taaatttattacgnatataaa

SEQ ID NO: 310141 - DNA, 21 bp, Artificial sequence
  SiRNA target sequence
  misc_feature (13)..(13): n is a, c, g, or t
aaatttattacgnatataaat

SEQ ID NO: 310142 - DNA, 21 bp, Artificial sequence
  SiRNA target sequence
  misc_feature (12)..(12): n is a, c, g, or t
aatttattacgnatataaata

SEQ ID NO: 310143 - DNA, 21 bp, Artificial sequence
  SiRNA target sequence
  misc_feature (11)..(11): n is a, c, g, or t
atttattacgnatataaatat

SEQ ID NO: 310144 - DNA, 21 bp, Artificial sequence
  SiRNA target sequence
  misc_feature (10)..(10): n is a, c, g, or t
tttattacgnatataaatatt

SEQ ID NO: 310145 - DNA, 21 bp, Artificial sequence
  SiRNA target sequence
  misc_feature (9)..(9): n is a, c, g, or t
ttattacgnatataaatattt

SEQ ID NO: 310146 - DNA, 21 bp, Artificial sequence
  SiRNA target sequence
  misc_feature (8)..(8): n is a, c, g, or t
tattacgnatataaatatttt

SEQ ID NO: 310147 - DNA, 21 bp, Artificial sequence
  SiRNA target sequence
  misc_feature (7)..(7): n is a, c, g, or t
attacgnatataaatattttt

SEQ ID NO: 310148 - DNA, 21 bp, Artificial sequence
  SiRNA target sequence
  misc_feature (6)..(6): n is a, c, g, or t
ttacgnatataaatattttta

SEQ ID NO: 310149 - DNA, 21 bp, Artificial sequence
  SiRNA target sequence
  misc_feature (5)..(5): n is a, c, g, or t
tacgnatataaatatttttag

SEQ ID NO: 310150 - DNA, 21 bp, Artificial sequence
  SiRNA target sequence
  misc_feature (4)..(4): n is a, c, g, or t
acgnatataaatatttttagt

SEQ ID NO: 310151 - DNA, 21 bp, Artificial sequence
  SiRNA target sequence
  misc_feature (3)..(3): n is a, c, g, or t
cgnatataaatatttttagta

SEQ ID NO: 310152 - DNA, 21 bp, Artificial sequence
  SiRNA target sequence
  misc_feature (2)..(2): n is a, c, g, or t
gnatataaatatttttagtat

SEQ ID NO: 310153 - DNA, 21 bp, Artificial sequence
  SiRNA target sequence
  misc_feature (1)..(1): n is a, c, g, or t
natataaatatttttagtatg

SEQ ID NO: 310154 - DNA, 21 bp, Artificial sequence
  SiRNA target sequence
atataaatatttttagtatgg

SEQ ID NO: 310155 - DNA, 21 bp, Artificial sequence
  SiRNA target sequence
tataaatatttttagtatggg

SEQ ID NO: 310156 - DNA, 21 bp, Artificial sequence
  SiRNA target sequence
ataaatatttttagtatggga

SEQ ID NO: 310157 - DNA, 21 bp, Artificial sequence
  SiRNA target sequence
taaatatttttagtatgggaa

SEQ ID NO: 310158 - DNA, 21 bp, Artificial sequence
  SiRNA target sequence
aaatatttttagtatgggaat

SEQ ID NO: 310159 - DNA, 21 bp, Artificial sequence
  SiRNA target sequence
aatatttttagtatgggaatt

SEQ ID NO: 310160 - DNA, 21 bp, Artificial sequence
  SiRNA target sequence
atatttttagtatgggaattg

SEQ ID NO: 310161 - DNA, 21 bp, Artificial sequence
  SiRNA target sequence
tatttttagtatgggaattgg

SEQ ID NO: 310162 - DNA, 21 bp, Artificial sequence
  SiRNA target sequence
atttttagtatgggaattgga

SEQ ID NO: 310163 - DNA, 21 bp, Artificial sequence
  SiRNA target sequence
tttttagtatgggaattggag

SEQ ID NO: 310164 - DNA, 21 bp, Artificial sequence
  SiRNA target sequence
ttttagtatgggaattggaga

SEQ ID NO: 310165 - DNA, 21 bp, Artificial sequence
  SiRNA target sequence
tttagtatgggaattggagac

SEQ ID NO: 310166 - DNA, 21 bp, Artificial sequence
  SiRNA target sequence
ttagtatgggaattggagacg

SEQ ID NO: 310167 - DNA, 21 bp, Artificial sequence
  SiRNA target sequence
tagtatgggaattggagacgc

SEQ ID NO: 310168 - DNA, 21 bp, Artificial sequence
  SiRNA target sequence
agtatgggaattggagacgca

SEQ ID NO: 310169 - DNA, 21 bp, Artificial sequence
  SiRNA target sequence
gtatgggaattggagacgcag

SEQ ID NO: 310170 - DNA, 21 bp, Artificial sequence
  SiRNA target sequence
tatgggaattggagacgcagt

SEQ ID NO: 310171 - DNA, 21 bp, Artificial sequence
  SiRNA target sequence
atgggaattggagacgcagta

SEQ ID NO: 310172 - DNA, 21 bp, Artificial sequence
  SiRNA target sequence
tgggaattggagacgcagtag

SEQ ID NO: 310173 - DNA, 21 bp, Artificial sequence
  SiRNA target sequence
gggaattggagacgcagtagc

SEQ ID NO: 310174 - DNA, 21 bp, Artificial sequence
  SiRNA target sequence
ggaattggagacgcagtagct

SEQ ID NO: 310175 - DNA, 21 bp, Artificial sequence
  SiRNA target sequence
gaattggagacgcagtagctg

SEQ ID NO: 310176 - DNA, 21 bp, Artificial sequence
  SiRNA target sequence
aattggagacgcagtagctga

SEQ ID NO: 310177 - DNA, 21 bp, Artificial sequence
  SiRNA target sequence
attggagacgcagtagctgat

SEQ ID NO: 310178 - DNA, 21 bp, Artificial sequence
  SiRNA target sequence
ttggagacgcagtagctgatc

SEQ ID NO: 310179 - DNA, 21 bp, Artificial sequence
  SiRNA target sequence
tggagacgcagtagctgatca

SEQ ID NO: 310180 - DNA, 21 bp, Artificial sequence
  SiRNA target sequence
ggagacgcagtagctgatcaa

SEQ ID NO: 310181 - DNA, 21 bp, Artificial sequence
  SiRNA target sequence
gagacgcagtagctgatcaag

SEQ ID NO: 310182 - DNA, 21 bp, Artificial sequence
  SiRNA target sequence
agacgcagtagctgatcaaga

SEQ ID NO: 310183 - DNA, 21 bp, Artificial sequence
  SiRNA target sequence
gacgcagtagctgatcaagat

SEQ ID NO: 310184 - DNA, 21 bp, Artificial sequence
  SiRNA target sequence
acgcagtagctgatcaagata

SEQ ID NO: 310185 - DNA, 21 bp, Artificial sequence
  SiRNA target sequence
cgcagtagctgatcaagatac

SEQ ID NO: 310186 - DNA, 21 bp, Artificial sequence
  SiRNA target sequence
gcagtagctgatcaagatact

SEQ ID NO: 310187 - DNA, 21 bp, Artificial sequence
  SiRNA target sequence
cagtagctgatcaagatacta

SEQ ID NO: 310188 - DNA, 21 bp, Artificial sequence
  SiRNA target sequence
agtagctgatcaagatactat

SEQ ID NO: 310189 - DNA, 21 bp, Artificial sequence
  SiRNA target sequence
gtagctgatcaagatactatg

SEQ ID NO: 310190 - DNA, 21 bp, Artificial sequence
  SiRNA target sequence
tagctgatcaagatactatgt

SEQ ID NO: 310191 - DNA, 21 bp, Artificial sequence
  SiRNA target sequence
agctgatcaagatactatgtt

SEQ ID NO: 310192 - DNA, 21 bp, Artificial sequence
  SiRNA target sequence
gctgatcaagatactatgttt

SEQ ID NO: 310193 - DNA, 21 bp, Artificial sequence
  SiRNA target sequence
ctgatcaagatactatgtttt

SEQ ID NO: 310194 - DNA, 21 bp, Artificial sequence
  SiRNA target sequence
tgatcaagatactatgtttta

SEQ ID NO: 310195 - DNA, 21 bp, Artificial sequence
  SiRNA target sequence
gatcaagatactatgttttat

SEQ ID NO: 310196 - DNA, 21 bp, Artificial sequence
  SiRNA target sequence
atcaagatactatgttttatg

SEQ ID NO: 310197 - DNA, 21 bp, Artificial sequence
  SiRNA target sequence
tcaagatactatgttttatgt

SEQ ID NO: 310198 - DNA, 21 bp, Artificial sequence
  SiRNA target sequence
caagatactatgttttatgtc

SEQ ID NO: 310199 - DNA, 21 bp, Artificial sequence
  SiRNA target sequence
aagatactatgttttatgtca

SEQ ID NO: 310200 - DNA, 21 bp, Artificial sequence
  SiRNA target sequence
agatactatgttttatgtcaa

SEQ ID NO: 310201 - DNA, 21 bp, Artificial sequence
  SiRNA target sequence
gatactatgttttatgtcaag

SEQ ID NO: 310202 - DNA, 21 bp, Artificial sequence
  SiRNA target sequence
atactatgttttatgtcaagg

SEQ ID NO: 310203 - DNA, 21 bp, Artificial sequence
  SiRNA target sequence
tactatgttttatgtcaagga

SEQ ID NO: 310204 - DNA, 21 bp, Artificial sequence
  SiRNA target sequence
actatgttttatgtcaaggaa

SEQ ID NO: 310205 - DNA, 21 bp, Artificial sequence
  SiRNA target sequence
ctatgttttatgtcaaggaat

SEQ ID NO: 310206 - DNA, 21 bp, Artificial sequence
  SiRNA target sequence
tatgttttatgtcaaggaatc

SEQ ID NO: 310207 - DNA, 21 bp, Artificial sequence
  SiRNA target sequence
atgttttatgtcaaggaatct

SEQ ID NO: 310208 - DNA, 21 bp, Artificial sequence
  SiRNA target sequence
tgttttatgtcaaggaatcta

SEQ ID NO: 310209 - DNA, 21 bp, Artificial sequence
  SiRNA target sequence
gttttatgtcaaggaatctat

SEQ ID NO: 310210 - DNA, 21 bp, Artificial sequence
  SiRNA target sequence
ttttatgtcaaggaatctata

SEQ ID NO: 310211 - DNA, 21 bp, Artificial sequence
  SiRNA target sequence
tttatgtcaaggaatctatag

SEQ ID NO: 310212 - DNA, 21 bp, Artificial sequence
  SiRNA target sequence
ttatgtcaaggaatctataga

SEQ ID NO: 310213 - DNA, 21 bp, Artificial sequence
  SiRNA target sequence
tatgtcaaggaatctatagaa

SEQ ID NO: 310214 - DNA, 21 bp, Artificial sequence
  SiRNA target sequence
atgtcaaggaatctatagaaa

SEQ ID NO: 310215 - DNA, 21 bp, Artificial sequence
  SiRNA target sequence
tgtcaaggaatctatagaaag

SEQ ID NO: 310216 - DNA, 21 bp, Artificial sequence
  SiRNA target sequence
gtcaaggaatctatagaaagt

SEQ ID NO: 310217 - DNA, 21 bp, Artificial sequence
  SiRNA target sequence
tcaaggaatctatagaaagtg

SEQ ID NO: 310218 - DNA, 21 bp, Artificial sequence
  SiRNA target sequence
caaggaatctatagaaagtgc

SEQ ID NO: 310219 - DNA, 21 bp, Artificial sequence
  SiRNA target sequence
aaggaatctatagaaagtgct

SEQ ID NO: 310220 - DNA, 21 bp, Artificial sequence
  SiRNA target sequence
aggaatctatagaaagtgcta

SEQ ID NO: 310221 - DNA, 21 bp, Artificial sequence
  SiRNA target sequence
ggaatctatagaaagtgctaa

SEQ ID NO: 310222 - DNA, 21 bp, Artificial sequence
  SiRNA target sequence
gaatctatagaaagtgctaaa

SEQ ID NO: 310223 - DNA, 21 bp, Artificial sequence
  SiRNA target sequence
aatctatagaaagtgctaaag

SEQ ID NO: 310224 - DNA, 21 bp, Artificial sequence
  SiRNA target sequence
atctatagaaagtgctaaaga

SEQ ID NO: 310225 - DNA, 21 bp, Artificial sequence
  SiRNA target sequence
tctatagaaagtgctaaagag

SEQ ID NO: 310226 - DNA, 21 bp, Artificial sequence
  SiRNA target sequence
ctatagaaagtgctaaagaga

SEQ ID NO: 310227 - DNA, 21 bp, Artificial sequence
  SiRNA target sequence
tatagaaagtgctaaagagaa

SEQ ID NO: 310228 - DNA, 21 bp, Artificial sequence
  SiRNA target sequence
atagaaagtgctaaagagaaa

SEQ ID NO: 310229 - DNA, 21 bp, Artificial sequence
  SiRNA target sequence
tagaaagtgctaaagagaaag

SEQ ID NO: 310230 - DNA, 21 bp, Artificial sequence
  SiRNA target sequence
agaaagtgctaaagagaaagt

SEQ ID NO: 310231 - DNA, 21 bp, Artificial sequence
  SiRNA target sequence
gaaagtgctaaagagaaagta

SEQ ID NO: 310232 - DNA, 21 bp, Artificial sequence
  SiRNA target sequence
  misc_feature (21)..(21): n is a, c, g, or t
aaagtgctaaagagaaagtan

SEQ ID NO: 310233 - DNA, 21 bp, Artificial sequence
  SiRNA target sequence
  misc_feature (20)..(20): n is a, c, g, or t
aagtgctaaagagaaagtang

SEQ ID NO: 310234 - DNA, 21 bp, Artificial sequence
  SiRNA target sequence
  misc_feature (19)..(19): n is a, c, g, or t
agtgctaaagagaaagtangt

SEQ ID NO: 310235 - DNA, 21 bp, Artificial sequence
  SiRNA target sequence
  misc_feature (18)..(18): n is a, c, g, or t
gtgctaaagagaaagtangtg

SEQ ID NO: 310236 - DNA, 21 bp, Artificial sequence
  SiRNA target sequence
  misc_feature (17)..(17): n is a, c, g, or t
tgctaaagagaaagtangtga

SEQ ID NO: 310237 - DNA, 21 bp, Artificial sequence
  SiRNA target sequence
  misc_feature (16)..(16): n is a, c, g, or t
gctaaagagaaagtangtgat

SEQ ID NO: 310238 - DNA, 21 bp, Artificial sequence
  SiRNA target sequence
  misc_feature (15)..(15): n is a, c, g, or t
ctaaagagaaagtangtgata

SEQ ID NO: 310239 - DNA, 21 bp, Artificial sequence
  SiRNA target sequence
  misc_feature (14)..(14): n is a, c, g, or t
taaagagaaagtangtgatat

SEQ ID NO: 310240 - DNA, 21 bp, Artificial sequence
  SiRNA target sequence
  misc_feature (13)..(13): n is a, c, g, or t
aaagagaaagtangtgatatt

SEQ ID NO: 310241 - DNA, 21 bp, Artificial sequence
  SiRNA target sequence
  misc_feature (12)..(12): n is a, c, g, or t
aagagaaagtangtgatatta

SEQ ID NO: 310242 - DNA, 21 bp, Artificial sequence
  SiRNA target sequence
  misc_feature (11)..(11): n is a, c, g, or t
agagaaagtangtgatattat

SEQ ID NO: 310243 - DNA, 21 bp, Artificial sequence
  SiRNA target sequence
  misc_feature (10)..(10): n is a, c, g, or t
gagaaagtangtgatattata

SEQ ID NO: 310244 - DNA, 21 bp, Artificial sequence
  SiRNA target sequence
  misc_feature (9)..(9): n is a, c, g, or t
agaaagtangtgatattataa

SEQ ID NO: 310245 - DNA, 21 bp, Artificial sequence
  SiRNA target sequence
  misc_feature (8)..(8): n is a, c, g, or t
gaaagtangtgatattataaa

SEQ ID NO: 310246 - DNA, 21 bp, Artificial sequence
  SiRNA target sequence
  misc_feature (7)..(7): n is a, c, g, or t
aaagtangtgatattataaaa

SEQ ID NO: 310247 - DNA, 21 bp, Artificial sequence
  SiRNA target sequence
  misc_feature (6)..(6): n is a, c, g, or t
aagtangtgatattataaaaa

SEQ ID NO: 310248 - DNA, 21 bp, Artificial sequence
  SiRNA target sequence
  misc_feature (5)..(5): n is a, c, g, or t
agtangtgatattataaaaaa

SEQ ID NO: 310249 - DNA, 21 bp, Artificial sequence
  SiRNA target sequence
  misc_feature (4)..(4): n is a, c, g, or t
gtangtgatattataaaaaaa

SEQ ID NO: 310250 - DNA, 21 bp, Artificial sequence
  SiRNA target sequence
  misc_feature (3)..(3): n is a, c, g, or t
tangtgatattataaaaaaag

SEQ ID NO: 310251 - DNA, 21 bp, Artificial sequence
  SiRNA target sequence
  misc_feature (2)..(2): n is a, c, g, or t
angtgatattataaaaaaagc

SEQ ID NO: 310252 - DNA, 21 bp, Artificial sequence
  SiRNA target sequence
  misc_feature (1)..(1): n is a, c, g, or t
ngtgatattataaaaaaagca

SEQ ID NO: 310253 - DNA, 21 bp, Artificial sequence
  SiRNA target sequence
gtgatattataaaaaaagcac

SEQ ID NO: 310254 - DNA, 21 bp, Artificial sequence
  SiRNA target sequence
tgatattataaaaaaagcaca

SEQ ID NO: 310255 - DNA, 21 bp, Artificial sequence
  SiRNA target sequence
gatattataaaaaaagcacat

SEQ ID NO: 310256 - DNA, 21 bp, Artificial sequence
  SiRNA target sequence
atattataaaaaaagcacata

SEQ ID NO: 310257 - DNA, 21 bp, Artificial sequence
  SiRNA target sequence
tattataaaaaaagcacataa

SEQ ID NO: 310258 - DNA, 21 bp, Artificial sequence
  SiRNA target sequence
attataaaaaaagcacataaa

SEQ ID NO: 310259 - DNA, 21 bp, Artificial sequence
  SiRNA target sequence
ttataaaaaaagcacataaaa

SEQ ID NO: 310260 - DNA, 21 bp, Artificial sequence
  SiRNA target sequence
tataaaaaaagcacataaaaa

SEQ ID NO: 310261 - DNA, 21 bp, Artificial sequence
  SiRNA target sequence
ataaaaaaagcacataaaaat

SEQ ID NO: 310262 - DNA, 21 bp, Artificial sequence
  SiRNA target sequence
taaaaaaagcacataaaaatt

SEQ ID NO: 310263 - DNA, 21 bp, Artificial sequence
  SiRNA target sequence
aaaaaaagcacataaaaattc

SEQ ID NO: 310264 - DNA, 21 bp, Artificial sequence
  SiRNA target sequence
aaaaaagcacataaaaattca

SEQ ID NO: 310265 - DNA, 21 bp, Artificial sequence
  SiRNA target sequence
aaaaagcacataaaaattcac

SEQ ID NO: 310266 - DNA, 21 bp, Artificial sequence
  SiRNA target sequence
aaaagcacataaaaattcact

SEQ ID NO: 310267 - DNA, 21 bp, Artificial sequence
  SiRNA target sequence
aaagcacataaaaattcacta

SEQ ID NO: 310268 - DNA, 21 bp, Artificial sequence
  SiRNA target sequence
aagcacataaaaattcactag

SEQ ID NO: 310269 - DNA, 21 bp, Artificial sequence
  SiRNA target sequence
agcacataaaaattcactaga

SEQ ID NO: 310270 - DNA, 21 bp, Artificial sequence
  SiRNA target sequence
gcacataaaaattcactagaa

SEQ ID NO: 310271 - DNA, 21 bp, Artificial sequence
  SiRNA target sequence
cacataaaaattcactagaaa

SEQ ID NO: 310272 - DNA, 21 bp, Artificial sequence
  SiRNA target sequence
acataaaaattcactagaaag

SEQ ID NO: 310273 - DNA, 21 bp, Artificial sequence
  SiRNA target sequence
cataaaaattcactagaaaga

SEQ ID NO: 310274 - DNA, 21 bp, Artificial sequence
  SiRNA target sequence
ataaaaattcactagaaagat

SEQ ID NO: 310275 - DNA, 21 bp, Artificial sequence
  SiRNA target sequence
taaaaattcactagaaagatt

SEQ ID NO: 310276 - DNA, 21 bp, Artificial sequence
  SiRNA target sequence
aaaaattcactagaaagattg

SEQ ID NO: 310277 - DNA, 21 bp, Artificial sequence
  SiRNA target sequence
aaaattcactagaaagattgc

SEQ ID NO: 310278 - DNA, 21 bp, Artificial sequence
  SiRNA target sequence
aaattcactagaaagattgcc

SEQ ID NO: 310279 - DNA, 21 bp, Artificial sequence
  SiRNA target sequence
aattcactagaaagattgcca

SEQ ID NO: 310280 - DNA, 21 bp, Artificial sequence
  SiRNA target sequence
attcactagaaagattgccag

SEQ ID NO: 310281 - DNA, 21 bp, Artificial sequence
  SiRNA target sequence
ttcactagaaagattgccagg

SEQ ID NO: 310282 - DNA, 21 bp, Artificial sequence
  SiRNA target sequence
tcactagaaagattgccaggt

SEQ ID NO: 310283 - DNA, 21 bp, Artificial sequence
  SiRNA target sequence
cactagaaagattgccaggta

SEQ ID NO: 310284 - DNA, 21 bp, Artificial sequence
  SiRNA target sequence
actagaaagattgccaggtat

SEQ ID NO: 310285 - DNA, 21 bp, Artificial sequence
  SiRNA target sequence
ctagaaagattgccaggtatg

SEQ ID NO: 310286 - DNA, 21 bp, Artificial sequence
  SiRNA target sequence
tagaaagattgccaggtatgt

SEQ ID NO: 310287 - DNA, 21 bp, Artificial sequence
  SiRNA target sequence
agaaagattgccaggtatgtc

SEQ ID NO: 310288 - DNA, 21 bp, Artificial sequence
  SiRNA target sequence
  misc_feature (21)..(21): n is a, c, g, or t
gaaagattgccaggtatgtcn

SEQ ID NO: 310289 - DNA, 21 bp, Artificial sequence
  SiRNA target sequence
  misc_feature (20)..(20): n is a, c, g, or t
aaagattgccaggtatgtcna

SEQ ID NO: 310290 - DNA, 21 bp, Artificial sequence
  SiRNA target sequence
  misc_feature (19)..(19): n is a, c, g, or t
aagattgccaggtatgtcnat

SEQ ID NO: 310291 - DNA, 21 bp, Artificial sequence
  SiRNA target sequence
  misc_feature (18)..(18): n is a, c, g, or t
agattgccaggtatgtcnatg

SEQ ID NO: 310292 - DNA, 21 bp, Artificial sequence
  SiRNA target sequence
  misc_feature (17)..(17): n is a, c, g, or t
gattgccaggtatgtcnatga

SEQ ID NO: 310293 - DNA, 21 bp, Artificial sequence
  SiRNA target sequence
  misc_feature (16)..(16): n is a, c, g, or t
attgccaggtatgtcnatgaa

SEQ ID NO: 310294 - DNA, 21 bp, Artificial sequence
  SiRNA target sequence
  misc_feature (15)..(15): n is a, c, g, or t
ttgccaggtatgtcnatgaaa

SEQ ID NO: 310295 - DNA, 21 bp, Artificial sequence
  SiRNA target sequence
  misc_feature (14)..(14): n is a, c, g, or t
tgccaggtatgtcnatgaaag

SEQ ID NO: 310296 - DNA, 21 bp, Artificial sequence
  SiRNA target sequence
  misc_feature (13)..(13): n is a, c, g, or t
gccaggtatgtcnatgaaaga

SEQ ID NO: 310297 - DNA, 21 bp, Artificial sequence
  SiRNA target sequence
  misc_feature (12)..(12): n is a, c, g, or t
ccaggtatgtcnatgaaagaa

SEQ ID NO: 310298 - DNA, 21 bp, Artificial sequence
  SiRNA target sequence
  misc_feature (11)..(11): n is a, c, g, or t
caggtatgtcnatgaaagaaa

SEQ ID NO: 310299 - DNA, 21 bp, Artificial sequence
  SiRNA target sequence
  misc_feature (10)..(10): n is a, c, g, or t
aggtatgtcnatgaaagaaag

SEQ ID NO: 310300 - DNA, 21 bp, Artificial sequence
  SiRNA target sequence
  misc_feature (9)..(9): n is a, c, g, or t
ggtatgtcnatgaaagaaagt

SEQ ID NO: 310301 - DNA, 21 bp, Artificial sequence
  SiRNA target sequence
  misc_feature (8)..(8): n is a, c, g, or t
gtatgtcnatgaaagaaagtt

SEQ ID NO: 310302 - DNA, 21 bp, Artificial sequence
  SiRNA target sequence
  misc_feature (7)..(7): n is a, c, g, or t
tatgtcnatgaaagaaagttt

SEQ ID NO: 310303 - DNA, 21 bp, Artificial sequence
  SiRNA target sequence
  misc_feature (6)..(6): n is a, c, g, or t
atgtcnatgaaagaaagtttc

SEQ ID NO: 310304 - DNA, 21 bp, Artificial sequence
  SiRNA target sequence
  misc_feature (5)..(5): n is a, c, g, or t
tgtcnatgaaagaaagtttcg

SEQ ID NO: 310305 - DNA, 21 bp, Artificial sequence
  SiRNA target sequence
  misc_feature (4)..(4): n is a, c, g, or t
gtcnatgaaagaaagtttcga

SEQ ID NO: 310306 - DNA, 21 bp, Artificial sequence
  SiRNA target sequence
  misc_feature (3)..(3): n is a, c, g, or t
tcnatgaaagaaagtttcgaa

SEQ ID NO: 310307 - DNA, 21 bp, Artificial sequence
  SiRNA target sequence
  misc_feature (2)..(2): n is a, c, g, or t
cnatgaaagaaagtttcgaaa

SEQ ID NO: 310308 - DNA, 21 bp, Artificial sequence
  SiRNA target sequence
  misc_feature (1)..(1): n is a, c, g, or t
natgaaagaaagtttcgaaag

SEQ ID NO: 310309 - DNA, 21 bp, Artificial sequence
  SiRNA target sequence
atgaaagaaagtttcgaaagt

SEQ ID NO: 310310 - DNA, 21 bp, Artificial sequence
  SiRNA target sequence
tgaaagaaagtttcgaaagtc

SEQ ID NO: 310311 - DNA, 21 bp, Artificial sequence
  SiRNA target sequence
gaaagaaagtttcgaaagtca

SEQ ID NO: 310312 - DNA, 21 bp, Artificial sequence
  SiRNA target sequence
aaagaaagtttcgaaagtcaa

SEQ ID NO: 310313 - DNA, 21 bp, Artificial sequence
  SiRNA target sequence
aagaaagtttcgaaagtcaag

SEQ ID NO: 310314 - DNA, 21 bp, Artificial sequence
  SiRNA target sequence
agaaagtttcgaaagtcaagt

SEQ ID NO: 310315 - DNA, 21 bp, Artificial sequence
  SiRNA target sequence
gaaagtttcgaaagtcaagtt

SEQ ID NO: 310316 - DNA, 21 bp, Artificial sequence
  SiRNA target sequence
aaagtttcgaaagtcaagtta

SEQ ID NO: 310317 - DNA, 21 bp, Artificial sequence
  SiRNA target sequence
aagtttcgaaagtcaagttaa

SEQ ID NO: 310318 - DNA, 21 bp, Artificial sequence
  SiRNA target sequence
agtttcgaaagtcaagttaat

SEQ ID NO: 310319 - DNA, 21 bp, Artificial sequence
  SiRNA target sequence
gtttcgaaagtcaagttaatc

SEQ ID NO: 310320 - DNA, 21 bp, Artificial sequence
  SiRNA target sequence
tttcgaaagtcaagttaatca

SEQ ID NO: 310321 - DNA, 21 bp, Artificial sequence
  SiRNA target sequence
ttcgaaagtcaagttaatcat

SEQ ID NO: 310322 - DNA, 21 bp, Artificial sequence
  SiRNA target sequence
tcgaaagtcaagttaatcata

SEQ ID NO: 310323 - DNA, 21 bp, Artificial sequence
  SiRNA target sequence
cgaaagtcaagttaatcatat

SEQ ID NO: 310324 - DNA, 21 bp, Artificial sequence
  SiRNA target sequence
gaaagtcaagttaatcatatt

SEQ ID NO: 310325 - DNA, 21 bp, Artificial sequence
  SiRNA target sequence
aaagtcaagttaatcatattt

SEQ ID NO: 310326 - DNA, 21 bp, Artificial sequence
  SiRNA target sequence
aagtcaagttaatcatatttt

SEQ ID NO: 310327 - DNA, 21 bp, Artificial sequence
  SiRNA target sequence
agtcaagttaatcatatttta

SEQ ID NO: 310328 - DNA, 21 bp, Artificial sequence
  SiRNA target sequence
gtcaagttaatcatattttaa

SEQ ID NO: 310329 - DNA, 21 bp, Artificial sequence
  SiRNA target sequence
tcaagttaatcatattttaaa

SEQ ID NO: 310330 - DNA, 21 bp, Artificial sequence
  SiRNA target sequence
caagttaatcatattttaaat

SEQ ID NO: 310331 - DNA, 21 bp, Artificial sequence
  SiRNA target sequence
aagttaatcatattttaaata

SEQ ID NO: 310332 - DNA, 21 bp, Artificial sequence
  SiRNA target sequence
agttaatcatattttaaataa

SEQ ID NO: 310333 - DNA, 21 bp, Artificial sequence
  SiRNA target sequence
gttaatcatattttaaataaa

SEQ ID NO: 310334 - DNA, 21 bp, Artificial sequence
  SiRNA target sequence
ttaatcatattttaaataaag

SEQ ID NO: 310335 - DNA, 21 bp, Artificial sequence
  SiRNA target sequence
taatcatattttaaataaagc

SEQ ID NO: 310336 - DNA, 21 bp, Artificial sequence
  SiRNA target sequence
aatcatattttaaataaagca

SEQ ID NO: 310337 - DNA, 21 bp, Artificial sequence
  SiRNA target sequence
atcatattttaaataaagcaa

SEQ ID NO: 310338 - DNA, 21 bp, Artificial sequence
  SiRNA target sequence
tcatattttaaataaagcaag

SEQ ID NO: 310339 - DNA, 21 bp, Artificial sequence
  SiRNA target sequence
catattttaaataaagcaaga

SEQ ID NO: 310340 - DNA, 21 bp, Artificial sequence
  SiRNA target sequence
atattttaaataaagcaagag

SEQ ID NO: 310341 - DNA, 21 bp, Artificial sequence
  SiRNA target sequence
tattttaaataaagcaagaga

SEQ ID NO: 310342 - DNA, 21 bp, Artificial sequence
  SiRNA target sequence
attttaaataaagcaagagac

SEQ ID NO: 310343 - DNA, 21 bp, Artificial sequence
  SiRNA target sequence
ttttaaataaagcaagagacg

SEQ ID NO: 310344 - DNA, 21 bp, Artificial sequence
  SiRNA target sequence
tttaaataaagcaagagacgt

SEQ ID NO: 310345 - DNA, 21 bp, Artificial sequence
  SiRNA target sequence
ttaaataaagcaagagacgtt

SEQ ID NO: 310346 - DNA, 21 bp, Artificial sequence
  SiRNA target sequence
taaataaagcaagagacgttt

SEQ ID NO: 310347 - DNA, 21 bp, Artificial sequence
  SiRNA target sequence
aaataaagcaagagacgtttc

SEQ ID NO: 310348 - DNA, 21 bp, Artificial sequence
  SiRNA target sequence
aataaagcaagagacgtttct

SEQ ID NO: 310349 - DNA, 21 bp, Artificial sequence
  SiRNA target sequence
ataaagcaagagacgtttctg

SEQ ID NO: 310350 - DNA, 21 bp, Artificial sequence
  SiRNA target sequence
taaagcaagagacgtttctgg

SEQ ID NO: 310351 - DNA, 21 bp, Artificial sequence
  SiRNA target sequence
aaagcaagagacgtttctggt

SEQ ID NO: 310352 - DNA, 21 bp, Artificial sequence
  SiRNA target sequence
aagcaagagacgtttctggta

SEQ ID NO: 310353 - DNA, 21 bp, Artificial sequence
  SiRNA target sequence
agcaagagacgtttctggtac

SEQ ID NO: 310354 - DNA, 21 bp, Artificial sequence
  SiRNA target sequence
gcaagagacgtttctggtacc

SEQ ID NO: 310355 - DNA, 21 bp, Artificial sequence
  SiRNA target sequence
caagagacgtttctggtacct

SEQ ID NO: 310356 - DNA, 21 bp, Artificial sequence
  SiRNA target sequence
aagagacgtttctggtacctc

SEQ ID NO: 310357 - DNA, 21 bp, Artificial sequence
  SiRNA target sequence
agagacgtttctggtacctca

SEQ ID NO: 310358 - DNA, 21 bp, Artificial sequence
  SiRNA target sequence
gagacgtttctggtacctcaa

SEQ ID NO: 310359 - DNA, 21 bp, Artificial sequence
  SiRNA target sequence
agacgtttctggtacctcaac

SEQ ID NO: 310360 - DNA, 21 bp, Artificial sequence
  SiRNA target sequence
gacgtttctggtacctcaact

SEQ ID NO: 310361 - DNA, 21 bp, Artificial sequence
  SiRNA target sequence
acgtttctggtacctcaactc

SEQ ID NO: 310362 - DNA, 21 bp, Artificial sequence
  SiRNA target sequence
cgtttctggtacctcaactca

SEQ ID NO: 310363 - DNA, 21 bp, Artificial sequence
  SiRNA target sequence
gtttctggtacctcaactcaa

SEQ ID NO: 310364 - DNA, 21 bp, Artificial sequence
  SiRNA target sequence
tttctggtacctcaactcaaa

SEQ ID NO: 310365 - DNA, 21 bp, Artificial sequence
  SiRNA target sequence
ttctggtacctcaactcaaaa

SEQ ID NO: 310366 - DNA, 21 bp, Artificial sequence
  SiRNA target sequence
tctggtacctcaactcaaaaa

SEQ ID NO: 310367 - DNA, 21 bp, Artificial sequence
  SiRNA target sequence
ctggtacctcaactcaaaaaa

SEQ ID NO: 310368 - DNA, 21 bp, Artificial sequence
  SiRNA target sequence
tggtacctcaactcaaaaaag

SEQ ID NO: 310369 - DNA, 21 bp, Artificial sequence
  SiRNA target sequence
ggtacctcaactcaaaaaagt

SEQ ID NO: 310370 - DNA, 21 bp, Artificial sequence
  SiRNA target sequence
gtacctcaactcaaaaaagtt

SEQ ID NO: 310371 - DNA, 21 bp, Artificial sequence
  SiRNA target sequence
tacctcaactcaaaaaagttt

SEQ ID NO: 310372 - DNA, 21 bp, Artificial sequence
  SiRNA target sequence
acctcaactcaaaaaagttta

SEQ ID NO: 310373 - DNA, 21 bp, Artificial sequence
  SiRNA target sequence
cctcaactcaaaaaagtttaa

SEQ ID NO: 310374 - DNA, 21 bp, Artificial sequence
  SiRNA target sequence
ctcaactcaaaaaagtttaaa

SEQ ID NO: 310375 - DNA, 21 bp, Artificial sequence
  SiRNA target sequence
tcaactcaaaaaagtttaaat

SEQ ID NO: 310376 - DNA, 21 bp, Artificial sequence
  SiRNA target sequence
caactcaaaaaagtttaaatt

SEQ ID NO: 310377 - DNA, 21 bp, Artificial sequence
  SiRNA target sequence
aactcaaaaaagtttaaattt

SEQ ID NO: 310378 - DNA, 21 bp, Artificial sequence
  SiRNA target sequence
actcaaaaaagtttaaattta

SEQ ID NO: 310379 - DNA, 21 bp, Artificial sequence
  SiRNA target sequence
ctcaaaaaagtttaaatttat

SEQ ID NO: 310380 - DNA, 21 bp, Artificial sequence
  SiRNA target sequence
tcaaaaaagtttaaatttatc

SEQ ID NO: 310381 - DNA, 21 bp, Artificial sequence
  SiRNA target sequence
caaaaaagtttaaatttatct

SEQ ID NO: 310382 - DNA, 21 bp, Artificial sequence
  SiRNA target sequence
aaaaaagtttaaatttatcta

SEQ ID NO: 310383 - DNA, 21 bp, Artificial sequence
  SiRNA target sequence
aaaaagtttaaatttatctaa

SEQ ID NO: 310384 - DNA, 21 bp, Artificial sequence
  SiRNA target sequence
aaaagtttaaatttatctaat

SEQ ID NO: 310385 - DNA, 21 bp, Artificial sequence
  SiRNA target sequence
aaagtttaaatttatctaata

SEQ ID NO: 310386 - DNA, 21 bp, Artificial sequence
  SiRNA target sequence
aagtttaaatttatctaataa

SEQ ID NO: 310387 - DNA, 21 bp, Artificial sequence
  SiRNA target sequence
agtttaaatttatctaataat

SEQ ID NO: 310388 - DNA, 21 bp, Artificial sequence
  SiRNA target sequence
gtttaaatttatctaataatc

SEQ ID NO: 310389 - DNA, 21 bp, Artificial sequence
  SiRNA target sequence
tttaaatttatctaataatct

SEQ ID NO: 310390 - DNA, 21 bp, Artificial sequence
  SiRNA target sequence
ttaaatttatctaataatcta

SEQ ID NO: 310391 - DNA, 21 bp, Artificial sequence
  SiRNA target sequence
taaatttatctaataatctaa

SEQ ID NO: 310392 - DNA, 21 bp, Artificial sequence
  SiRNA target sequence
aaatttatctaataatctaaa

SEQ ID NO: 310393 - DNA, 21 bp, Artificial sequence
  SiRNA target sequence
aatttatctaataatctaaaa

SEQ ID NO: 310394 - DNA, 21 bp, Artificial sequence
  SiRNA target sequence
atttatctaataatctaaaaa

SEQ ID NO: 310395 - DNA, 21 bp, Artificial sequence
  SiRNA target sequence
tttatctaataatctaaaaac

SEQ ID NO: 310396 - DNA, 21 bp, Artificial sequence
  SiRNA target sequence
ttatctaataatctaaaaact

SEQ ID NO: 310397 - DNA, 21 bp, Artificial sequence
  SiRNA target sequence
tatctaataatctaaaaacta

SEQ ID NO: 310398 - DNA, 21 bp, Artificial sequence
  SiRNA target sequence
atctaataatctaaaaactat

SEQ ID NO: 310399 - DNA, 21 bp, Artificial sequence
  SiRNA target sequence
tctaataatctaaaaactatg

SEQ ID NO: 310400 - DNA, 21 bp, Artificial sequence
  SiRNA target sequence
ctaataatctaaaaactatgg

SEQ ID NO: 310401 - DNA, 21 bp, Artificial sequence
  SiRNA target sequence
taataatctaaaaactatggt

SEQ ID NO: 310402 - DNA, 21 bp, Artificial sequence
  SiRNA target sequence
aataatctaaaaactatggtt

SEQ ID NO: 310403 - DNA, 21 bp, Artificial sequence
  SiRNA target sequence
ataatctaaaaactatggttt

SEQ ID NO: 310404 - DNA, 21 bp, Artificial sequence
  SiRNA target sequence
taatctaaaaactatggtttt

SEQ ID NO: 310405 - DNA, 21 bp, Artificial sequence
  SiRNA target sequence
aatctaaaaactatggttttg

SEQ ID NO: 310406 - DNA, 21 bp, Artificial sequence
  SiRNA target sequence
atctaaaaactatggttttgt

SEQ ID NO: 310407 - DNA, 21 bp, Artificial sequence
  SiRNA target sequence
tctaaaaactatggttttgtc

SEQ ID NO: 310408 - DNA, 21 bp, Artificial sequence
  SiRNA target sequence
ctaaaaactatggttttgtct

SEQ ID NO: 310409 - DNA, 21 bp, Artificial sequence
  SiRNA target sequence
taaaaactatggttttgtctg

SEQ ID NO: 310410 - DNA, 21 bp, Artificial sequence
  SiRNA target sequence
aaaaactatggttttgtctgg

SEQ ID NO: 310411 - DNA, 21 bp, Artificial sequence
  SiRNA target sequence
aaaactatggttttgtctgga

SEQ ID NO: 310412 - DNA, 21 bp, Artificial sequence
  SiRNA target sequence
aaactatggttttgtctggat

SEQ ID NO: 310413 - DNA, 21 bp, Artificial sequence
  SiRNA target sequence
aactatggttttgtctggatc

SEQ ID NO: 310414 - DNA, 21 bp, Artificial sequence
  SiRNA target sequence
actatggttttgtctggatca

SEQ ID NO: 310415 - DNA, 21 bp, Artificial sequence
  SiRNA target sequence
ctatggttttgtctggatcaa

SEQ ID NO: 310416 - DNA, 21 bp, Artificial sequence
  SiRNA target sequence
tatggttttgtctggatcaaa

SEQ ID NO: 310417 - DNA, 21 bp, Artificial sequence
  SiRNA target sequence
atggttttgtctggatcaaaa

SEQ ID NO: 310418 - DNA, 21 bp, Artificial sequence
  SiRNA target sequence
tggttttgtctggatcaaaag

SEQ ID NO: 310419 - DNA, 21 bp, Artificial sequence
  SiRNA target sequence
ggttttgtctggatcaaaagg

SEQ ID NO: 310420 - DNA, 21 bp, Artificial sequence
  SiRNA target sequence
gttttgtctggatcaaaaggt

SEQ ID NO: 310421 - DNA, 21 bp, Artificial sequence
  SiRNA target sequence
ttttgtctggatcaaaaggtt

SEQ ID NO: 310422 - DNA, 21 bp, Artificial sequence
  SiRNA target sequence
tttgtctggatcaaaaggttc

SEQ ID NO: 310423 - DNA, 21 bp, Artificial sequence
  SiRNA target sequence
ttgtctggatcaaaaggttca

SEQ ID NO: 310424 - DNA, 21 bp, Artificial sequence
  SiRNA target sequence
tgtctggatcaaaaggttcat

SEQ ID NO: 310425 - DNA, 21 bp, Artificial sequence
  SiRNA target sequence
gtctggatcaaaaggttcatt

SEQ ID NO: 310426 - DNA, 21 bp, Artificial sequence
  SiRNA target sequence
tctggatcaaaaggttcattt

SEQ ID NO: 310427 - DNA, 21 bp, Artificial sequence
  SiRNA target sequence
ctggatcaaaaggttcattta

SEQ ID NO: 310428 - DNA, 21 bp, Artificial sequence
  SiRNA target sequence
tggatcaaaaggttcatttat

SEQ ID NO: 310429 - DNA, 21 bp, Artificial sequence
  SiRNA target sequence
ggatcaaaaggttcatttatc

SEQ ID NO: 310430 - DNA, 21 bp, Artificial sequence
  SiRNA target sequence
gatcaaaaggttcatttatca

SEQ ID NO: 310431 - DNA, 21 bp, Artificial sequence
  SiRNA target sequence
atcaaaaggttcatttatcaa

SEQ ID NO: 310432 - DNA, 21 bp, Artificial sequence
  SiRNA target sequence
tcaaaaggttcatttatcaat

SEQ ID NO: 310433 - DNA, 21 bp, Artificial sequence
  SiRNA target sequence
caaaaggttcatttatcaata

SEQ ID NO: 310434 - DNA, 21 bp, Artificial sequence
  SiRNA target sequence
aaaaggttcatttatcaatat

SEQ ID NO: 310435 - DNA, 21 bp, Artificial sequence
  SiRNA target sequence
aaaggttcatttatcaatatt

SEQ ID NO: 310436 - DNA, 21 bp, Artificial sequence
  SiRNA target sequence
aaggttcatttatcaatattt

SEQ ID NO: 310437 - DNA, 21 bp, Artificial sequence
  SiRNA target sequence
aggttcatttatcaatatttc

SEQ ID NO: 310438 - DNA, 21 bp, Artificial sequence
  SiRNA target sequence
ggttcatttatcaatatttca

SEQ ID NO: 310439 - DNA, 21 bp, Artificial sequence
  SiRNA target sequence
gttcatttatcaatatttcac

SEQ ID NO: 310440 - DNA, 21 bp, Artificial sequence
  SiRNA target sequence
ttcatttatcaatatttcaca

SEQ ID NO: 310441 - DNA, 21 bp, Artificial sequence
  SiRNA target sequence
tcatttatcaatatttcacag

SEQ ID NO: 310442 - DNA, 21 bp, Artificial sequence
  SiRNA target sequence
catttatcaatatttcacagg

SEQ ID NO: 310443 - DNA, 21 bp, Artificial sequence
  SiRNA target sequence
atttatcaatatttcacaggt

SEQ ID NO: 310444 - DNA, 21 bp, Artificial sequence
  SiRNA target sequence
tttatcaatatttcacaggta

SEQ ID NO: 310445 - DNA, 21 bp, Artificial sequence
  SiRNA target sequence
ttatcaatatttcacaggtaa

SEQ ID NO: 310446 - DNA, 21 bp, Artificial sequence
  SiRNA target sequence
tatcaatatttcacaggtaat

SEQ ID NO: 310447 - DNA, 21 bp, Artificial sequence
  SiRNA target sequence
atcaatatttcacaggtaatg

SEQ ID NO: 310448 - DNA, 21 bp, Artificial sequence
  SiRNA target sequence
tcaatatttcacaggtaatgg

SEQ ID NO: 310449 - DNA, 21 bp, Artificial sequence
  SiRNA target sequence
caatatttcacaggtaatggc

SEQ ID NO: 310450 - DNA, 21 bp, Artificial sequence
  SiRNA target sequence
aatatttcacaggtaatggct

SEQ ID NO: 310451 - DNA, 21 bp, Artificial sequence
  SiRNA target sequence
atatttcacaggtaatggctt

SEQ ID NO: 310452 - DNA, 21 bp, Artificial sequence
  SiRNA target sequence
tatttcacaggtaatggcttg

SEQ ID NO: 310453 - DNA, 21 bp, Artificial sequence
  SiRNA target sequence
atttcacaggtaatggcttgt

SEQ ID NO: 310454 - DNA, 21 bp, Artificial sequence
  SiRNA target sequence
tttcacaggtaatggcttgtg

SEQ ID NO: 310455 - DNA, 21 bp, Artificial sequence
  SiRNA target sequence
ttcacaggtaatggcttgtgt

SEQ ID NO: 310456 - DNA, 21 bp, Artificial sequence
  SiRNA target sequence
tcacaggtaatggcttgtgta

SEQ ID NO: 310457 - DNA, 21 bp, Artificial sequence
  SiRNA target sequence
cacaggtaatggcttgtgtag

SEQ ID NO: 310458 - DNA, 21 bp, Artificial sequence
  SiRNA target sequence
acaggtaatggcttgtgtagg

SEQ ID NO: 310459 - DNA, 21 bp, Artificial sequence
  SiRNA target sequence
caggtaatggcttgtgtaggt

SEQ ID NO: 310460 - DNA, 21 bp, Artificial sequence
  SiRNA target sequence
aggtaatggcttgtgtaggtc

SEQ ID NO: 310461 - DNA, 21 bp, Artificial sequence
  SiRNA target sequence
ggtaatggcttgtgtaggtca

SEQ ID NO: 310462 - DNA, 21 bp, Artificial sequence
  SiRNA target sequence
gtaatggcttgtgtaggtcag

SEQ ID NO: 310463 - DNA, 21 bp, Artificial sequence
  SiRNA target sequence
taatggcttgtgtaggtcagc

SEQ ID NO: 310464 - DNA, 21 bp, Artificial sequence
  SiRNA target sequence
aatggcttgtgtaggtcagca

SEQ ID NO: 310465 - DNA, 21 bp, Artificial sequence
  SiRNA target sequence
atggcttgtgtaggtcagcaa

SEQ ID NO: 310466 - DNA, 21 bp, Artificial sequence
  SiRNA target sequence
tggcttgtgtaggtcagcaaa

SEQ ID NO: 310467 - DNA, 21 bp, Artificial sequence
  SiRNA target sequence
ggcttgtgtaggtcagcaaaa

SEQ ID NO: 310468 - DNA, 21 bp, Artificial sequence
  SiRNA target sequence
gcttgtgtaggtcagcaaaat

SEQ ID NO: 310469 - DNA, 21 bp, Artificial sequence
  SiRNA target sequence
cttgtgtaggtcagcaaaatg

SEQ ID NO: 310470 - DNA, 21 bp, Artificial sequence
  SiRNA target sequence
ttgtgtaggtcagcaaaatgt

SEQ ID NO: 310471 - DNA, 21 bp, Artificial sequence
  SiRNA target sequence
tgtgtaggtcagcaaaatgtt

SEQ ID NO: 310472 - DNA, 21 bp, Artificial sequence
  SiRNA target sequence
gtgtaggtcagcaaaatgttg

SEQ ID NO: 310473 - DNA, 21 bp, Artificial sequence
  SiRNA target sequence
tgtaggtcagcaaaatgttga

SEQ ID NO: 310474 - DNA, 21 bp, Artificial sequence
  SiRNA target sequence
gtaggtcagcaaaatgttgaa

SEQ ID NO: 310475 - DNA, 21 bp, Artificial sequence
  SiRNA target sequence
taggtcagcaaaatgttgaag

SEQ ID NO: 310476 - DNA, 21 bp, Artificial sequence
  SiRNA target sequence
aggtcagcaaaatgttgaagg

SEQ ID NO: 310477 - DNA, 21 bp, Artificial sequence
  SiRNA target sequence
ggtcagcaaaatgttgaagga

SEQ ID NO: 310478 - DNA, 21 bp, Artificial sequence
  SiRNA target sequence
gtcagcaaaatgttgaaggaa

SEQ ID NO: 310479 - DNA, 21 bp, Artificial sequence
  SiRNA target sequence
tcagcaaaatgttgaaggaaa

SEQ ID NO: 310480 - DNA, 21 bp, Artificial sequence
  SiRNA target sequence
cagcaaaatgttgaaggaaaa

SEQ ID NO: 310481 - DNA, 21 bp, Artificial sequence
  SiRNA target sequence
agcaaaatgttgaaggaaaac

SEQ ID NO: 310482 - DNA, 21 bp, Artificial sequence
  SiRNA target sequence
gcaaaatgttgaaggaaaacg

SEQ ID NO: 310483 - DNA, 21 bp, Artificial sequence
  SiRNA target sequence
caaaatgttgaaggaaaacga

SEQ ID NO: 310484 - DNA, 21 bp, Artificial sequence
  SiRNA target sequence
aaaatgttgaaggaaaacgaa

SEQ ID NO: 310485 - DNA, 21 bp, Artificial sequence
  SiRNA target sequence
aaatgttgaaggaaaacgaat

SEQ ID NO: 310486 - DNA, 21 bp, Artificial sequence
  SiRNA target sequence
aatgttgaaggaaaacgaatt

SEQ ID NO: 310487 - DNA, 21 bp, Artificial sequence
  SiRNA target sequence
atgttgaaggaaaacgaattc

SEQ ID NO: 310488 - DNA, 21 bp, Artificial sequence
  SiRNA target sequence
tgttgaaggaaaacgaattcc

SEQ ID NO: 310489 - DNA, 21 bp, Artificial sequence
  SiRNA target sequence
gttgaaggaaaacgaattcct

SEQ ID NO: 310490 - DNA, 21 bp, Artificial sequence
  SiRNA target sequence
ttgaaggaaaacgaattcctt

SEQ ID NO: 310491 - DNA, 21 bp, Artificial sequence
  SiRNA target sequence
tgaaggaaaacgaattccttt

SEQ ID NO: 310492 - DNA, 21 bp, Artificial sequence
  SiRNA target sequence
gaaggaaaacgaattcctttt

SEQ ID NO: 310493 - DNA, 21 bp, Artificial sequence
  SiRNA target sequence
aaggaaaacgaattccttttg

SEQ ID NO: 310494 - DNA, 21 bp, Artificial sequence
  SiRNA target sequence
aggaaaacgaattccttttgg

SEQ ID NO: 310495 - DNA, 21 bp, Artificial sequence
  SiRNA target sequence
ggaaaacgaattccttttgga

SEQ ID NO: 310496 - DNA, 21 bp, Artificial sequence
  SiRNA target sequence
gaaaacgaattccttttggat

SEQ ID NO: 310497 - DNA, 21 bp, Artificial sequence
  SiRNA target sequence
aaaacgaattccttttggatt

SEQ ID NO: 310498 - DNA, 21 bp, Artificial sequence
  SiRNA target sequence
aaacgaattccttttggattc

SEQ ID NO: 310499 - DNA, 21 bp, Artificial sequence
  SiRNA target sequence
aacgaattccttttggattca

SEQ ID NO: 310500 - DNA, 21 bp, Artificial sequence
  SiRNA target sequence
acgaattccttttggattcaa

SEQ ID NO: 310501 - DNA, 21 bp, Artificial sequence
  SiRNA target sequence
cgaattccttttggattcaaa

SEQ ID NO: 310502 - DNA, 21 bp, Artificial sequence
  SiRNA target sequence
gaattccttttggattcaaat

SEQ ID NO: 310503 - DNA, 21 bp, Artificial sequence
  SiRNA target sequence
aattccttttggattcaaata

SEQ ID NO: 310504 - DNA, 21 bp, Artificial sequence
  SiRNA target sequence
attccttttggattcaaatat

SEQ ID NO: 310505 - DNA, 21 bp, Artificial sequence
  SiRNA target sequence
ttccttttggattcaaatatc

SEQ ID NO: 310506 - DNA, 21 bp, Artificial sequence
  SiRNA target sequence
tccttttggattcaaatatcg

SEQ ID NO: 310507 - DNA, 21 bp, Artificial sequence
  SiRNA target sequence
ccttttggattcaaatatcga

SEQ ID NO: 310508 - DNA, 21 bp, Artificial sequence
  SiRNA target sequence
cttttggattcaaatatcgaa

SEQ ID NO: 310509 - DNA, 21 bp, Artificial sequence
  SiRNA target sequence
ttttggattcaaatatcgaac

SEQ ID NO: 310510 - DNA, 21 bp, Artificial sequence
  SiRNA target sequence
tttggattcaaatatcgaact

SEQ ID NO: 310511 - DNA, 21 bp, Artificial sequence
  SiRNA target sequence
ttggattcaaatatcgaactc

SEQ ID NO: 310512 - DNA, 21 bp, Artificial sequence
  SiRNA target sequence
tggattcaaatatcgaactct

SEQ ID NO: 310513 - DNA, 21 bp, Artificial sequence
  SiRNA target sequence
ggattcaaatatcgaactcta

SEQ ID NO: 310514 - DNA, 21 bp, Artificial sequence
  SiRNA target sequence
gattcaaatatcgaactctac

SEQ ID NO: 310515 - DNA, 21 bp, Artificial sequence
  SiRNA target sequence
attcaaatatcgaactctacc

SEQ ID NO: 310516 - DNA, 21 bp, Artificial sequence
  SiRNA target sequence
ttcaaatatcgaactctacca

SEQ ID NO: 310517 - DNA, 21 bp, Artificial sequence
  SiRNA target sequence
tcaaatatcgaactctaccac

SEQ ID NO: 310518 - DNA, 21 bp, Artificial sequence
  SiRNA target sequence
caaatatcgaactctaccaca

SEQ ID NO: 310519 - DNA, 21 bp, Artificial sequence
  SiRNA target sequence
aaatatcgaactctaccacat

SEQ ID NO: 310520 - DNA, 21 bp, Artificial sequence
  SiRNA target sequence
aatatcgaactctaccacatt

SEQ ID NO: 310521 - DNA, 21 bp, Artificial sequence
  SiRNA target sequence
atatcgaactctaccacattt

SEQ ID NO: 310522 - DNA, 21 bp, Artificial sequence
  SiRNA target sequence
tatcgaactctaccacatttt

SEQ ID NO: 310523 - DNA, 21 bp, Artificial sequence
  SiRNA target sequence
atcgaactctaccacattttt

SEQ ID NO: 310524 - DNA, 21 bp, Artificial sequence
  SiRNA target sequence
tcgaactctaccacatttttt

SEQ ID NO: 310525 - DNA, 21 bp, Artificial sequence
  SiRNA target sequence
cgaactctaccacattttttg

SEQ ID NO: 310526 - DNA, 21 bp, Artificial sequence
  SiRNA target sequence
gaactctaccacattttttga

SEQ ID NO: 310527 - DNA, 21 bp, Artificial sequence
  SiRNA target sequence
aactctaccacattttttgaa

SEQ ID NO: 310528 - DNA, 21 bp, Artificial sequence
  SiRNA target sequence
actctaccacattttttgaaa

SEQ ID NO: 310529 - DNA, 21 bp, Artificial sequence
  SiRNA target sequence
ctctaccacattttttgaaag

SEQ ID NO: 310530 - DNA, 21 bp, Artificial sequence
  SiRNA target sequence
tctaccacattttttgaaaga

SEQ ID NO: 310531 - DNA, 21 bp, Artificial sequence
  SiRNA target sequence
ctaccacattttttgaaagaa

SEQ ID NO: 310532 - DNA, 21 bp, Artificial sequence
  SiRNA target sequence
taccacattttttgaaagaag

SEQ ID NO: 310533 - DNA, 21 bp, Artificial sequence
  SiRNA target sequence
accacattttttgaaagaaga

SEQ ID NO: 310534 - DNA, 21 bp, Artificial sequence
  SiRNA target sequence
ccacattttttgaaagaagat

SEQ ID NO: 310535 - DNA, 21 bp, Artificial sequence
  SiRNA target sequence
cacattttttgaaagaagatt

SEQ ID NO: 310536 - DNA, 21 bp, Artificial sequence
  SiRNA target sequence
acattttttgaaagaagatta

SEQ ID NO: 310537 - DNA, 21 bp, Artificial sequence
  SiRNA target sequence
cattttttgaaagaagattat

SEQ ID NO: 310538 - DNA, 21 bp, Artificial sequence
  SiRNA target sequence
attttttgaaagaagattatt

SEQ ID NO: 310539 - DNA, 21 bp, Artificial sequence
  SiRNA target sequence
ttttttgaaagaagattattc

SEQ ID NO: 310540 - DNA, 21 bp, Artificial sequence
  SiRNA target sequence
tttttgaaagaagattattct

SEQ ID NO: 310541 - DNA, 21 bp, Artificial sequence
  SiRNA target sequence
ttttgaaagaagattattctg

SEQ ID NO: 310542 - DNA, 21 bp, Artificial sequence
  SiRNA target sequence
tttgaaagaagattattctgg

SEQ ID NO: 310543 - DNA, 21 bp, Artificial sequence
  SiRNA target sequence
ttgaaagaagattattctgga

SEQ ID NO: 310544 - DNA, 21 bp, Artificial sequence
  SiRNA target sequence
tgaaagaagattattctggaa

SEQ ID NO: 310545 - DNA, 21 bp, Artificial sequence
  SiRNA target sequence
gaaagaagattattctggaaa

SEQ ID NO: 310546 - DNA, 21 bp, Artificial sequence
  SiRNA target sequence
aaagaagattattctggaaaa

SEQ ID NO: 310547 - DNA, 21 bp, Artificial sequence
  SiRNA target sequence
aagaagattattctggaaaaa

SEQ ID NO: 310548 - DNA, 21 bp, Artificial sequence
  SiRNA target sequence
agaagattattctggaaaaag

SEQ ID NO: 310549 - DNA, 21 bp, Artificial sequence
  SiRNA target sequence
gaagattattctggaaaaagt

SEQ ID NO: 310550 - DNA, 21 bp, Artificial sequence
  SiRNA target sequence
aagattattctggaaaaagtc

SEQ ID NO: 310551 - DNA, 21 bp, Artificial sequence
  SiRNA target sequence
agattattctggaaaaagtcg

SEQ ID NO: 310552 - DNA, 21 bp, Artificial sequence
  SiRNA target sequence
gattattctggaaaaagtcgt

SEQ ID NO: 310553 - DNA, 21 bp, Artificial sequence
  SiRNA target sequence
attattctggaaaaagtcgtg

SEQ ID NO: 310554 - DNA, 21 bp, Artificial sequence
  SiRNA target sequence
ttattctggaaaaagtcgtgg

SEQ ID NO: 310555 - DNA, 21 bp, Artificial sequence
  SiRNA target sequence
tattctggaaaaagtcgtggt

SEQ ID NO: 310556 - DNA, 21 bp, Artificial sequence
  SiRNA target sequence
attctggaaaaagtcgtggtt

SEQ ID NO: 310557 - DNA, 21 bp, Artificial sequence
  SiRNA target sequence
ttctggaaaaagtcgtggttt

SEQ ID NO: 310558 - DNA, 21 bp, Artificial sequence
  SiRNA target sequence
tctggaaaaagtcgtggtttt

SEQ ID NO: 310559 - DNA, 21 bp, Artificial sequence
  SiRNA target sequence
ctggaaaaagtcgtggttttg

SEQ ID NO: 310560 - DNA, 21 bp, Artificial sequence
  SiRNA target sequence
tggaaaaagtcgtggttttgt

SEQ ID NO: 310561 - DNA, 21 bp, Artificial sequence
  SiRNA target sequence
ggaaaaagtcgtggttttgta

SEQ ID NO: 310562 - DNA, 21 bp, Artificial sequence
  SiRNA target sequence
gaaaaagtcgtggttttgtag

SEQ ID NO: 310563 - DNA, 21 bp, Artificial sequence
  SiRNA target sequence
aaaaagtcgtggttttgtaga

SEQ ID NO: 310564 - DNA, 21 bp, Artificial sequence
  SiRNA target sequence
aaaagtcgtggttttgtagaa

SEQ ID NO: 310565 - DNA, 21 bp, Artificial sequence
  SiRNA target sequence
aaagtcgtggttttgtagaaa

SEQ ID NO: 310566 - DNA, 21 bp, Artificial sequence
  SiRNA target sequence
aagtcgtggttttgtagaaaa

SEQ ID NO: 310567 - DNA, 21 bp, Artificial sequence
  SiRNA target sequence
agtcgtggttttgtagaaaac

SEQ ID NO: 310568 - DNA, 21 bp, Artificial sequence
  SiRNA target sequence
gtcgtggttttgtagaaaaca

SEQ ID NO: 310569 - DNA, 21 bp, Artificial sequence
  SiRNA target sequence
tcgtggttttgtagaaaacag

SEQ ID NO: 310570 - DNA, 21 bp, Artificial sequence
  SiRNA target sequence
cgtggttttgtagaaaacagt

SEQ ID NO: 310571 - DNA, 21 bp, Artificial sequence
  SiRNA target sequence
gtggttttgtagaaaacagtt

SEQ ID NO: 310572 - DNA, 21 bp, Artificial sequence
  SiRNA target sequence
tggttttgtagaaaacagtta

SEQ ID NO: 310573 - DNA, 21 bp, Artificial sequence
  SiRNA target sequence
ggttttgtagaaaacagttat

SEQ ID NO: 310574 - DNA, 21 bp, Artificial sequence
  SiRNA target sequence
gttttgtagaaaacagttatg

SEQ ID NO: 310575 - DNA, 21 bp, Artificial sequence
  SiRNA target sequence
ttttgtagaaaacagttatgt

SEQ ID NO: 310576 - DNA, 21 bp, Artificial sequence
  SiRNA target sequence
tttgtagaaaacagttatgtt

SEQ ID NO: 310577 - DNA, 21 bp, Artificial sequence
  SiRNA target sequence
ttgtagaaaacagttatgtta

SEQ ID NO: 310578 - DNA, 21 bp, Artificial sequence
  SiRNA target sequence
tgtagaaaacagttatgttaa

SEQ ID NO: 310579 - DNA, 21 bp, Artificial sequence
  SiRNA target sequence
gtagaaaacagttatgttaaa

SEQ ID NO: 310580 - DNA, 21 bp, Artificial sequence
  SiRNA target sequence
tagaaaacagttatgttaaag

SEQ ID NO: 310581 - DNA, 21 bp, Artificial sequence
  SiRNA target sequence
agaaaacagttatgttaaagg

SEQ ID NO: 310582 - DNA, 21 bp, Artificial sequence
  SiRNA target sequence
gaaaacagttatgttaaaggt

SEQ ID NO: 310583 - DNA, 21 bp, Artificial sequence
  SiRNA target sequence
aaaacagttatgttaaaggtt

SEQ ID NO: 310584 - DNA, 21 bp, Artificial sequence
  SiRNA target sequence
aaacagttatgttaaaggttt

SEQ ID NO: 310585 - DNA, 21 bp, Artificial sequence
  SiRNA target sequence
aacagttatgttaaaggttta

SEQ ID NO: 310586 - DNA, 21 bp, Artificial sequence
  SiRNA target sequence
acagttatgttaaaggtttat

SEQ ID NO: 310587 - DNA, 21 bp, Artificial sequence
  SiRNA target sequence
cagttatgttaaaggtttatc

SEQ ID NO: 310588 - DNA, 21 bp, Artificial sequence
  SiRNA target sequence
agttatgttaaaggtttatca

SEQ ID NO: 310589 - DNA, 21 bp, Artificial sequence
  SiRNA target sequence
gttatgttaaaggtttatcac

SEQ ID NO: 310590 - DNA, 21 bp, Artificial sequence
  SiRNA target sequence
ttatgttaaaggtttatcacc

SEQ ID NO: 310591 - DNA, 21 bp, Artificial sequence
  SiRNA target sequence
tatgttaaaggtttatcacct

SEQ ID NO: 310592 - DNA, 21 bp, Artificial sequence
  SiRNA target sequence
atgttaaaggtttatcacctg

SEQ ID NO: 310593 - DNA, 21 bp, Artificial sequence
  SiRNA target sequence
tgttaaaggtttatcacctga

SEQ ID NO: 310594 - DNA, 21 bp, Artificial sequence
  SiRNA target sequence
gttaaaggtttatcacctgaa

SEQ ID NO: 310595 - DNA, 21 bp, Artificial sequence
  SiRNA target sequence
ttaaaggtttatcacctgaag

SEQ ID NO: 310596 - DNA, 21 bp, Artificial sequence
  SiRNA target sequence
taaaggtttatcacctgaaga

SEQ ID NO: 310597 - DNA, 21 bp, Artificial sequence
  SiRNA target sequence
aaaggtttatcacctgaagaa

SEQ ID NO: 310598 - DNA, 21 bp, Artificial sequence
  SiRNA target sequence
aaggtttatcacctgaagaat

SEQ ID NO: 310599 - DNA, 21 bp, Artificial sequence
  SiRNA target sequence
aggtttatcacctgaagaatt

SEQ ID NO: 310600 - DNA, 21 bp, Artificial sequence
  SiRNA target sequence
ggtttatcacctgaagaattt

SEQ ID NO: 310601 - DNA, 21 bp, Artificial sequence
  SiRNA target sequence
gtttatcacctgaagaatttt

SEQ ID NO: 310602 - DNA, 21 bp, Artificial sequence
  SiRNA target sequence
tttatcacctgaagaatttta

SEQ ID NO: 310603 - DNA, 21 bp, Artificial sequence
  SiRNA target sequence
ttatcacctgaagaattttat

SEQ ID NO: 310604 - DNA, 21 bp, Artificial sequence
  SiRNA target sequence
tatcacctgaagaattttatt

SEQ ID NO: 310605 - DNA, 21 bp, Artificial sequence
  SiRNA target sequence
atcacctgaagaattttattt

SEQ ID NO: 310606 - DNA, 21 bp, Artificial sequence
  SiRNA target sequence
tcacctgaagaattttatttc

SEQ ID NO: 310607 - DNA, 21 bp, Artificial sequence
  SiRNA target sequence
cacctgaagaattttatttcc

SEQ ID NO: 310608 - DNA, 21 bp, Artificial sequence
  SiRNA target sequence
acctgaagaattttatttcca

SEQ ID NO: 310609 - DNA, 21 bp, Artificial sequence
  SiRNA target sequence
cctgaagaattttatttccat

SEQ ID NO: 310610 - DNA, 21 bp, Artificial sequence
  SiRNA target sequence
ctgaagaattttatttccatg

SEQ ID NO: 310611 - DNA, 21 bp, Artificial sequence
  SiRNA target sequence
tgaagaattttatttccatgc

SEQ ID NO: 310612 - DNA, 21 bp, Artificial sequence
  SiRNA target sequence
gaagaattttatttccatgcc

SEQ ID NO: 310613 - DNA, 21 bp, Artificial sequence
  SiRNA target sequence
aagaattttatttccatgcca

SEQ ID NO: 310614 - DNA, 21 bp, Artificial sequence
  SiRNA target sequence
agaattttatttccatgccat

SEQ ID NO: 310615 - DNA, 21 bp, Artificial sequence
  SiRNA target sequence
gaattttatttccatgccatg

SEQ ID NO: 310616 - DNA, 21 bp, Artificial sequence
  SiRNA target sequence
aattttatttccatgccatgg

SEQ ID NO: 310617 - DNA, 21 bp, Artificial sequence
  SiRNA target sequence
attttatttccatgccatggg

SEQ ID NO: 310618 - DNA, 21 bp, Artificial sequence
  SiRNA target sequence
ttttatttccatgccatgggt

SEQ ID NO: 310619 - DNA, 21 bp, Artificial sequence
  SiRNA target sequence
tttatttccatgccatgggtg

SEQ ID NO: 310620 - DNA, 21 bp, Artificial sequence
  SiRNA target sequence
ttatttccatgccatgggtgg

SEQ ID NO: 310621 - DNA, 21 bp, Artificial sequence
  SiRNA target sequence
tatttccatgccatgggtggt

SEQ ID NO: 310622 - DNA, 21 bp, Artificial sequence
  SiRNA target sequence
atttccatgccatgggtggtc

SEQ ID NO: 310623 - DNA, 21 bp, Artificial sequence
  SiRNA target sequence
tttccatgccatgggtggtcg

SEQ ID NO: 310624 - DNA, 21 bp, Artificial sequence
  SiRNA target sequence
ttccatgccatgggtggtcgt

SEQ ID NO: 310625 - DNA, 21 bp, Artificial sequence
  SiRNA target sequence
tccatgccatgggtggtcgtg

SEQ ID NO: 310626 - DNA, 21 bp, Artificial sequence
  SiRNA target sequence
ccatgccatgggtggtcgtga

SEQ ID NO: 310627 - DNA, 21 bp, Artificial sequence
  SiRNA target sequence
catgccatgggtggtcgtgaa

SEQ ID NO: 310628 - DNA, 21 bp, Artificial sequence
  SiRNA target sequence
atgccatgggtggtcgtgaag

SEQ ID NO: 310629 - DNA, 21 bp, Artificial sequence
  SiRNA target sequence
tgccatgggtggtcgtgaagg

SEQ ID NO: 310630 - DNA, 21 bp, Artificial sequence
  SiRNA target sequence
gccatgggtggtcgtgaagga

SEQ ID NO: 310631 - DNA, 21 bp, Artificial sequence
  SiRNA target sequence
ccatgggtggtcgtgaaggat

SEQ ID NO: 310632 - DNA, 21 bp, Artificial sequence
  SiRNA target sequence
catgggtggtcgtgaaggatt

SEQ ID NO: 310633 - DNA, 21 bp, Artificial sequence
  SiRNA target sequence
atgggtggtcgtgaaggatta

SEQ ID NO: 310634 - DNA, 21 bp, Artificial sequence
  SiRNA target sequence
tgggtggtcgtgaaggattaa

SEQ ID NO: 310635 - DNA, 21 bp, Artificial sequence
  SiRNA target sequence
gggtggtcgtgaaggattaat

SEQ ID NO: 310636 - DNA, 21 bp, Artificial sequence
  SiRNA target sequence
ggtggtcgtgaaggattaatt

SEQ ID NO: 310637 - DNA, 21 bp, Artificial sequence
  SiRNA target sequence
gtggtcgtgaaggattaattg

SEQ ID NO: 310638 - DNA, 21 bp, Artificial sequence
  SiRNA target sequence
tggtcgtgaaggattaattga

SEQ ID NO: 310639 - DNA, 21 bp, Artificial sequence
  SiRNA target sequence
ggtcgtgaaggattaattgat

SEQ ID NO: 310640 - DNA, 21 bp, Artificial sequence
  SiRNA target sequence
gtcgtgaaggattaattgata

SEQ ID NO: 310641 - DNA, 21 bp, Artificial sequence
  SiRNA target sequence
tcgtgaaggattaattgatac

SEQ ID NO: 310642 - DNA, 21 bp, Artificial sequence
  SiRNA target sequence
cgtgaaggattaattgataca

SEQ ID NO: 310643 - DNA, 21 bp, Artificial sequence
  SiRNA target sequence
gtgaaggattaattgatacag

SEQ ID NO: 310644 - DNA, 21 bp, Artificial sequence
  SiRNA target sequence
tgaaggattaattgatacagc

SEQ ID NO: 310645 - DNA, 21 bp, Artificial sequence
  SiRNA target sequence
gaaggattaattgatacagct

SEQ ID NO: 310646 - DNA, 21 bp, Artificial sequence
  SiRNA target sequence
aaggattaattgatacagcta

SEQ ID NO: 310647 - DNA, 21 bp, Artificial sequence
  SiRNA target sequence
aggattaattgatacagctat

SEQ ID NO: 310648 - DNA, 21 bp, Artificial sequence
  SiRNA target sequence
ggattaattgatacagctatt

SEQ ID NO: 310649 - DNA, 21 bp, Artificial sequence
  SiRNA target sequence
gattaattgatacagctatta

SEQ ID NO: 310650 - DNA, 21 bp, Artificial sequence
  SiRNA target sequence
attaattgatacagctattaa

SEQ ID NO: 310651 - DNA, 21 bp, Artificial sequence
  SiRNA target sequence
ttaattgatacagctattaaa

SEQ ID NO: 310652 - DNA, 21 bp, Artificial sequence
  SiRNA target sequence
taattgatacagctattaaaa

SEQ ID NO: 310653 - DNA, 21 bp, Artificial sequence
  SiRNA target sequence
aattgatacagctattaaaac

SEQ ID NO: 310654 - DNA, 21 bp, Artificial sequence
  SiRNA target sequence
attgatacagctattaaaact

SEQ ID NO: 310655 - DNA, 21 bp, Artificial sequence
  SiRNA target sequence
ttgatacagctattaaaactg

SEQ ID NO: 310656 - DNA, 21 bp, Artificial sequence
  SiRNA target sequence
tgatacagctattaaaactgc

SEQ ID NO: 310657 - DNA, 21 bp, Artificial sequence
  SiRNA target sequence
gatacagctattaaaactgca

SEQ ID NO: 310658 - DNA, 21 bp, Artificial sequence
  SiRNA target sequence
atacagctattaaaactgcag

SEQ ID NO: 310659 - DNA, 21 bp, Artificial sequence
  SiRNA target sequence
tacagctattaaaactgcaga

SEQ ID NO: 310660 - DNA, 21 bp, Artificial sequence
  SiRNA target sequence
acagctattaaaactgcagaa

SEQ ID NO: 310661 - DNA, 21 bp, Artificial sequence
  SiRNA target sequence
cagctattaaaactgcagaaa

SEQ ID NO: 310662 - DNA, 21 bp, Artificial sequence
  SiRNA target sequence
agctattaaaactgcagaaac

SEQ ID NO: 310663 - DNA, 21 bp, Artificial sequence
  SiRNA target sequence
tgccgacgatgtgatatgaga

SEQ ID NO: 310664 - DNA, 21 bp, Artificial sequence
  SiRNA target sequence
gccgacgatgtgatatgagat

SEQ ID NO: 310665 - DNA, 21 bp, Artificial sequence
  SiRNA target sequence
ccgacgatgtgatatgagatg

SEQ ID NO: 310666 - DNA, 21 bp, Artificial sequence
  SiRNA target sequence
cgacgatgtgatatgagatgt

SEQ ID NO: 310667 - DNA, 21 bp, Artificial sequence
  SiRNA target sequence
gacgatgtgatatgagatgtt

SEQ ID NO: 310668 - DNA, 21 bp, Artificial sequence
  SiRNA target sequence
acgatgtgatatgagatgttg

SEQ ID NO: 310669 - DNA, 21 bp, Artificial sequence
  SiRNA target sequence
cgatgtgatatgagatgttgt

SEQ ID NO: 310670 - DNA, 21 bp, Artificial sequence
  SiRNA target sequence
gatgtgatatgagatgttgta

SEQ ID NO: 310671 - DNA, 21 bp, Artificial sequence
  SiRNA target sequence
atgtgatatgagatgttgtat

SEQ ID NO: 310672 - DNA, 21 bp, Artificial sequence
  SiRNA target sequence
tgtgatatgagatgttgtatt

SEQ ID NO: 310673 - DNA, 21 bp, Artificial sequence
  SiRNA target sequence
gtgatatgagatgttgtatta

SEQ ID NO: 310674 - DNA, 21 bp, Artificial sequence
  SiRNA target sequence
tgatatgagatgttgtattac

SEQ ID NO: 310675 - DNA, 21 bp, Artificial sequence
  SiRNA target sequence
gatatgagatgttgtattaca

SEQ ID NO: 310676 - DNA, 21 bp, Artificial sequence
  SiRNA target sequence
atatgagatgttgtattacat

SEQ ID NO: 310677 - DNA, 21 bp, Artificial sequence
  SiRNA target sequence
tatgagatgttgtattacatt

SEQ ID NO: 310678 - DNA, 21 bp, Artificial sequence
  SiRNA target sequence
atgagatgttgtattacatta

SEQ ID NO: 310679 - DNA, 21 bp, Artificial sequence
  SiRNA target sequence
tgagatgttgtattacattat

SEQ ID NO: 310680 - DNA, 21 bp, Artificial sequence
  SiRNA target sequence
gagatgttgtattacattata

SEQ ID NO: 310681 - DNA, 21 bp, Artificial sequence
  SiRNA target sequence
agatgttgtattacattatag

SEQ ID NO: 310682 - DNA, 21 bp, Artificial sequence
  SiRNA target sequence
gatgttgtattacattataga

SEQ ID NO: 310683 - DNA, 21 bp, Artificial sequence
  SiRNA target sequence
atgttgtattacattatagaa

SEQ ID NO: 310684 - DNA, 21 bp, Artificial sequence
  SiRNA target sequence
tgttgtattacattatagaaa

SEQ ID NO: 310685 - DNA, 21 bp, Artificial sequence
  SiRNA target sequence
gttgtattacattatagaaat

SEQ ID NO: 310686 - DNA, 21 bp, Artificial sequence
  SiRNA target sequence
ttgtattacattatagaaatt

SEQ ID NO: 310687 - DNA, 21 bp, Artificial sequence
  SiRNA target sequence
tgtattacattatagaaatta

SEQ ID NO: 310688 - DNA, 21 bp, Artificial sequence
  SiRNA target sequence
gtattacattatagaaattag

SEQ ID NO: 310689 - DNA, 21 bp, Artificial sequence
  SiRNA target sequence
tattacattatagaaattaga

SEQ ID NO: 310690 - DNA, 21 bp, Artificial sequence
  SiRNA target sequence
attacattatagaaattagag

SEQ ID NO: 310691 - DNA, 21 bp, Artificial sequence
  SiRNA target sequence
ttacattatagaaattagagt

SEQ ID NO: 310692 - DNA, 21 bp, Artificial sequence
  SiRNA target sequence
tacattatagaaattagagtt

SEQ ID NO: 310693 - DNA, 21 bp, Artificial sequence
  SiRNA target sequence
acattatagaaattagagttt

SEQ ID NO: 310694 - DNA, 21 bp, Artificial sequence
  SiRNA target sequence
cattatagaaattagagtttt

SEQ ID NO: 310695 - DNA, 21 bp, Artificial sequence
  SiRNA target sequence
attatagaaattagagttttt

SEQ ID NO: 310696 - DNA, 21 bp, Artificial sequence
  SiRNA target sequence
ttatagaaattagagtttttt

SEQ ID NO: 310697 - DNA, 21 bp, Artificial sequence
  SiRNA target sequence
tatagaaattagagttttttg

SEQ ID NO: 310698 - DNA, 21 bp, Artificial sequence
  SiRNA target sequence
atagaaattagagttttttgg

SEQ ID NO: 310699 - DNA, 21 bp, Artificial sequence
  SiRNA target sequence
tagaaattagagttttttggc

SEQ ID NO: 310700 - DNA, 21 bp, Artificial sequence
  SiRNA target sequence
agaaattagagttttttggct

SEQ ID NO: 310701 - DNA, 21 bp, Artificial sequence
  SiRNA target sequence
gaaattagagttttttggctc

SEQ ID NO: 310702 - DNA, 21 bp, Artificial sequence
  SiRNA target sequence
aaattagagttttttggctct

SEQ ID NO: 310703 - DNA, 21 bp, Artificial sequence
  SiRNA target sequence
aattagagttttttggctctg

SEQ ID NO: 310704 - DNA, 21 bp, Artificial sequence
  SiRNA target sequence
attagagttttttggctctgg

SEQ ID NO: 310705 - DNA, 21 bp, Artificial sequence
  SiRNA target sequence
ttagagttttttggctctggg

SEQ ID NO: 310706 - DNA, 21 bp, Artificial sequence
  SiRNA target sequence
tagagttttttggctctgggg

SEQ ID NO: 310707 - DNA, 21 bp, Artificial sequence
  SiRNA target sequence
agagttttttggctctgggga

SEQ ID NO: 310708 - DNA, 21 bp, Artificial sequence
  SiRNA target sequence
gagttttttggctctggggat

SEQ ID NO: 310709 - DNA, 21 bp, Artificial sequence
  SiRNA target sequence
agttttttggctctggggata

SEQ ID NO: 310710 - DNA, 21 bp, Artificial sequence
  SiRNA target sequence
gttttttggctctggggatag

SEQ ID NO: 310711 - DNA, 21 bp, Artificial sequence
  SiRNA target sequence
ttttttggctctggggatagt

SEQ ID NO: 310712 - DNA, 21 bp, Artificial sequence
  SiRNA target sequence
tttttggctctggggatagta

SEQ ID NO: 310713 - DNA, 21 bp, Artificial sequence
  SiRNA target sequence
ttttggctctggggatagtat

SEQ ID NO: 310714 - DNA, 21 bp, Artificial sequence
  SiRNA target sequence
tttggctctggggatagtatg

SEQ ID NO: 310715 - DNA, 21 bp, Artificial sequence
  SiRNA target sequence
ttggctctggggatagtatga

SEQ ID NO: 310716 - DNA, 21 bp, Artificial sequence
  SiRNA target sequence
tggctctggggatagtatgat

SEQ ID NO: 310717 - DNA, 21 bp, Artificial sequence
  SiRNA target sequence
ggctctggggatagtatgatc

SEQ ID NO: 310718 - DNA, 21 bp, Artificial sequence
  SiRNA target sequence
gctctggggatagtatgatcg

SEQ ID NO: 310719 - DNA, 21 bp, Artificial sequence
  SiRNA target sequence
ctctggggatagtatgatcgc

SEQ ID NO: 310720 - DNA, 21 bp, Artificial sequence
  SiRNA target sequence
tctggggatagtatgatcgca

SEQ ID NO: 310721 - DNA, 21 bp, Artificial sequence
  SiRNA target sequence
ctggggatagtatgatcgcaa

SEQ ID NO: 310722 - DNA, 21 bp, Artificial sequence
  SiRNA target sequence
tggggatagtatgatcgcaag

SEQ ID NO: 310723 - DNA, 21 bp, Artificial sequence
  SiRNA target sequence
ggggatagtatgatcgcaaga

SEQ ID NO: 310724 - DNA, 21 bp, Artificial sequence
  SiRNA target sequence
gggatagtatgatcgcaagat

SEQ ID NO: 310725 - DNA, 21 bp, Artificial sequence
  SiRNA target sequence
ggatagtatgatcgcaagatt

SEQ ID NO: 310726 - DNA, 21 bp, Artificial sequence
  SiRNA target sequence
gatagtatgatcgcaagattg

SEQ ID NO: 310727 - DNA, 21 bp, Artificial sequence
  SiRNA target sequence
atagtatgatcgcaagattga

SEQ ID NO: 310728 - DNA, 21 bp, Artificial sequence
  SiRNA target sequence
tagtatgatcgcaagattgaa

SEQ ID NO: 310729 - DNA, 21 bp, Artificial sequence
  SiRNA target sequence
agtatgatcgcaagattgaaa

SEQ ID NO: 310730 - DNA, 21 bp, Artificial sequence
  SiRNA target sequence
gtatgatcgcaagattgaaaa

SEQ ID NO: 310731 - DNA, 21 bp, Artificial sequence
  SiRNA target sequence
tatgatcgcaagattgaaaat

SEQ ID NO: 310732 - DNA, 21 bp, Artificial sequence
  SiRNA target sequence
atgatcgcaagattgaaaatt

SEQ ID NO: 310733 - DNA, 21 bp, Artificial sequence
  SiRNA target sequence
tgatcgcaagattgaaaatta

SEQ ID NO: 310734 - DNA, 21 bp, Artificial sequence
  SiRNA target sequence
gatcgcaagattgaaaattaa

SEQ ID NO: 310735 - DNA, 21 bp, Artificial sequence
  SiRNA target sequence
atcgcaagattgaaaattaaa

SEQ ID NO: 310736 - DNA, 21 bp, Artificial sequence
  SiRNA target sequence
tcgcaagattgaaaattaaag

SEQ ID NO: 310737 - DNA, 21 bp, Artificial sequence
  SiRNA target sequence
cgcaagattgaaaattaaaga

SEQ ID NO: 310738 - DNA, 21 bp, Artificial sequence
  SiRNA target sequence
gcaagattgaaaattaaagaa

SEQ ID NO: 310739 - DNA, 21 bp, Artificial sequence
  SiRNA target sequence
caagattgaaaattaaagaaa

SEQ ID NO: 310740 - DNA, 21 bp, Artificial sequence
  SiRNA target sequence
aagattgaaaattaaagaaat

SEQ ID NO: 310741 - DNA, 21 bp, Artificial sequence
  SiRNA target sequence
agattgaaaattaaagaaatt

SEQ ID NO: 310742 - DNA, 21 bp, Artificial sequence
  SiRNA target sequence
gattgaaaattaaagaaattg

SEQ ID NO: 310743 - DNA, 21 bp, Artificial sequence
  SiRNA target sequence
attgaaaattaaagaaattga

SEQ ID NO: 310744 - DNA, 21 bp, Artificial sequence
  SiRNA target sequence
ttgaaaattaaagaaattgac

SEQ ID NO: 310745 - DNA, 21 bp, Artificial sequence
  SiRNA target sequence
tgaaaattaaagaaattgacg

SEQ ID NO: 310746 - DNA, 21 bp, Artificial sequence
  SiRNA target sequence
gaaaattaaagaaattgacgg

SEQ ID NO: 310747 - DNA, 21 bp, Artificial sequence
  SiRNA target sequence
aaaattaaagaaattgacgga

SEQ ID NO: 310748 - DNA, 21 bp, Artificial sequence
  SiRNA target sequence
aaattaaagaaattgacggaa

SEQ ID NO: 310749 - DNA, 21 bp, Artificial sequence
  SiRNA target sequence
aattaaagaaattgacggaag

SEQ ID NO: 310750 - DNA, 21 bp, Artificial sequence
  SiRNA target sequence
attaaagaaattgacggaaga

SEQ ID NO: 310751 - DNA, 21 bp, Artificial sequence
  SiRNA target sequence
ttaaagaaattgacggaagaa

SEQ ID NO: 310752 - DNA, 21 bp, Artificial sequence
  SiRNA target sequence
taaagaaattgacggaagaat

SEQ ID NO: 310753 - DNA, 21 bp, Artificial sequence
  SiRNA target sequence
aaagaaattgacggaagaata

SEQ ID NO: 310754 - DNA, 21 bp, Artificial sequence
  SiRNA target sequence
aagaaattgacggaagaatac

SEQ ID NO: 310755 - DNA, 21 bp, Artificial sequence
  SiRNA target sequence
agaaattgacggaagaatacc

SEQ ID NO: 310756 - DNA, 21 bp, Artificial sequence
  SiRNA target sequence
gaaattgacggaagaatacca

SEQ ID NO: 310757 - DNA, 21 bp, Artificial sequence
  SiRNA target sequence
aaattgacggaagaataccac

SEQ ID NO: 310758 - DNA, 21 bp, Artificial sequence
  SiRNA target sequence
aattgacggaagaataccaca

SEQ ID NO: 310759 - DNA, 21 bp, Artificial sequence
  SiRNA target sequence
attgacggaagaataccacaa

SEQ ID NO: 310760 - DNA, 21 bp, Artificial sequence
  SiRNA target sequence
ttgacggaagaataccacaag

SEQ ID NO: 310761 - DNA, 21 bp, Artificial sequence
  SiRNA target sequence
tgacggaagaataccacaagg

SEQ ID NO: 310762 - DNA, 21 bp, Artificial sequence
  SiRNA target sequence
gacggaagaataccacaagga

SEQ ID NO: 310763 - DNA, 21 bp, Artificial sequence
  SiRNA target sequence
acggaagaataccacaaggag

SEQ ID NO: 310764 - DNA, 21 bp, Artificial sequence
  SiRNA target sequence
cggaagaataccacaaggagt

SEQ ID NO: 310765 - DNA, 21 bp, Artificial sequence
  SiRNA target sequence
ggaagaataccacaaggagtg

SEQ ID NO: 310766 - DNA, 21 bp, Artificial sequence
  SiRNA target sequence
gaagaataccacaaggagtgg

SEQ ID NO: 310767 - DNA, 21 bp, Artificial sequence
  SiRNA target sequence
aagaataccacaaggagtgga

SEQ ID NO: 310768 - DNA, 21 bp, Artificial sequence
  SiRNA target sequence
agaataccacaaggagtggat

SEQ ID NO: 310769 - DNA, 21 bp, Artificial sequence
  SiRNA target sequence
gaataccacaaggagtggatt

SEQ ID NO: 310770 - DNA, 21 bp, Artificial sequence
  SiRNA target sequence
aataccacaaggagtggattg

SEQ ID NO: 310771 - DNA, 21 bp, Artificial sequence
  SiRNA target sequence
ataccacaaggagtggattgt

SEQ ID NO: 310772 - DNA, 21 bp, Artificial sequence
  SiRNA target sequence
taccacaaggagtggattgtg

SEQ ID NO: 310773 - DNA, 21 bp, Artificial sequence
  SiRNA target sequence
accacaaggagtggattgtgc

SEQ ID NO: 310774 - DNA, 21 bp, Artificial sequence
  SiRNA target sequence
ccacaaggagtggattgtgcg

SEQ ID NO: 310775 - DNA, 21 bp, Artificial sequence
  SiRNA target sequence
cacaaggagtggattgtgcgg

SEQ ID NO: 310776 - DNA, 21 bp, Artificial sequence
  SiRNA target sequence
acaaggagtggattgtgcggc

SEQ ID NO: 310777 - DNA, 21 bp, Artificial sequence
  SiRNA target sequence
caaggagtggattgtgcggct

SEQ ID NO: 310778 - DNA, 21 bp, Artificial sequence
  SiRNA target sequence
aaggagtggattgtgcggctt

SEQ ID NO: 310779 - DNA, 21 bp, Artificial sequence
  SiRNA target sequence
aggagtggattgtgcggctta

SEQ ID NO: 310780 - DNA, 21 bp, Artificial sequence
  SiRNA target sequence
ggagtggattgtgcggcttaa

SEQ ID NO: 310781 - DNA, 21 bp, Artificial sequence
  SiRNA target sequence
gagtggattgtgcggcttaat

SEQ ID NO: 310782 - DNA, 21 bp, Artificial sequence
  SiRNA target sequence
agtggattgtgcggcttaatt

SEQ ID NO: 310783 - DNA, 21 bp, Artificial sequence
  SiRNA target sequence
gtggattgtgcggcttaattt

SEQ ID NO: 310784 - DNA, 21 bp, Artificial sequence
  SiRNA target sequence
tggattgtgcggcttaatttg

SEQ ID NO: 310785 - DNA, 21 bp, Artificial sequence
  SiRNA target sequence
ggattgtgcggcttaatttga

SEQ ID NO: 310786 - DNA, 21 bp, Artificial sequence
  SiRNA target sequence
gattgtgcggcttaatttgac

SEQ ID NO: 310787 - DNA, 21 bp, Artificial sequence
  SiRNA target sequence
attgtgcggcttaatttgact

SEQ ID NO: 310788 - DNA, 21 bp, Artificial sequence
  SiRNA target sequence
ttgtgcggcttaatttgactc

SEQ ID NO: 310789 - DNA, 21 bp, Artificial sequence
  SiRNA target sequence
tgtgcggcttaatttgactca

SEQ ID NO: 310790 - DNA, 21 bp, Artificial sequence
  SiRNA target sequence
gtgcggcttaatttgactcaa

SEQ ID NO: 310791 - DNA, 21 bp, Artificial sequence
  SiRNA target sequence
tgcggcttaatttgactcaac

SEQ ID NO: 310792 - DNA, 21 bp, Artificial sequence
  SiRNA target sequence
gcggcttaatttgactcaacg

SEQ ID NO: 310793 - DNA, 21 bp, Artificial sequence
  SiRNA target sequence
cggcttaatttgactcaacgc

SEQ ID NO: 310794 - DNA, 21 bp, Artificial sequence
  SiRNA target sequence
ggcttaatttgactcaacgcg

SEQ ID NO: 310795 - DNA, 21 bp, Artificial sequence
  SiRNA target sequence
gcttaatttgactcaacgcga

SEQ ID NO: 310796 - DNA, 21 bp, Artificial sequence
  SiRNA target sequence
cttaatttgactcaacgcgag

SEQ ID NO: 310797 - DNA, 21 bp, Artificial sequence
  SiRNA target sequence
ttaatttgactcaacgcgagg

SEQ ID NO: 310798 - DNA, 21 bp, Artificial sequence
  SiRNA target sequence
taatttgactcaacgcgaggt

SEQ ID NO: 310799 - DNA, 21 bp, Artificial sequence
  SiRNA target sequence
aatttgactcaacgcgaggta

SEQ ID NO: 310800 - DNA, 21 bp, Artificial sequence
  SiRNA target sequence
atttgactcaacgcgaggtaa

SEQ ID NO: 310801 - DNA, 21 bp, Artificial sequence
  SiRNA target sequence
tttgactcaacgcgaggtaac

SEQ ID NO: 310802 - DNA, 21 bp, Artificial sequence
  SiRNA target sequence
ttgactcaacgcgaggtaact

SEQ ID NO: 310803 - DNA, 21 bp, Artificial sequence
  SiRNA target sequence
tgactcaacgcgaggtaactt

SEQ ID NO: 310804 - DNA, 21 bp, Artificial sequence
  SiRNA target sequence
gactcaacgcgaggtaactta

SEQ ID NO: 310805 - DNA, 21 bp, Artificial sequence
  SiRNA target sequence
actcaacgcgaggtaacttac

SEQ ID NO: 310806 - DNA, 21 bp, Artificial sequence
  SiRNA target sequence
ctcaacgcgaggtaacttacc

SEQ ID NO: 310807 - DNA, 21 bp, Artificial sequence
  SiRNA target sequence
tcaacgcgaggtaacttacca

SEQ ID NO: 310808 - DNA, 21 bp, Artificial sequence
  SiRNA target sequence
caacgcgaggtaacttaccaa

SEQ ID NO: 310809 - DNA, 21 bp, Artificial sequence
  SiRNA target sequence
aacgcgaggtaacttaccaat

SEQ ID NO: 310810 - DNA, 21 bp, Artificial sequence
  SiRNA target sequence
acgcgaggtaacttaccaata

SEQ ID NO: 310811 - DNA, 21 bp, Artificial sequence
  SiRNA target sequence
cgcgaggtaacttaccaatat

SEQ ID NO: 310812 - DNA, 21 bp, Artificial sequence
  SiRNA target sequence
gcgaggtaacttaccaatatt

SEQ ID NO: 310813 - DNA, 21 bp, Artificial sequence
  SiRNA target sequence
cgaggtaacttaccaatattt

SEQ ID NO: 310814 - DNA, 21 bp, Artificial sequence
  SiRNA target sequence
gaggtaacttaccaatatttt

SEQ ID NO: 310815 - DNA, 21 bp, Artificial sequence
  SiRNA target sequence
aggtaacttaccaatatttta

SEQ ID NO: 310816 - DNA, 21 bp, Artificial sequence
  SiRNA target sequence
ggtaacttaccaatattttat

SEQ ID NO: 310817 - DNA, 21 bp, Artificial sequence
  SiRNA target sequence
gtaacttaccaatattttatt

SEQ ID NO: 310818 - DNA, 21 bp, Artificial sequence
  SiRNA target sequence
taacttaccaatattttattg

SEQ ID NO: 310819 - DNA, 21 bp, Artificial sequence
  SiRNA target sequence
aacttaccaatattttattgt

SEQ ID NO: 310820 - DNA, 21 bp, Artificial sequence
  SiRNA target sequence
acttaccaatattttattgtt

SEQ ID NO: 310821 - DNA, 21 bp, Artificial sequence
  SiRNA target sequence
cttaccaatattttattgttc

SEQ ID NO: 310822 - DNA, 21 bp, Artificial sequence
  SiRNA target sequence
ttaccaatattttattgttct

SEQ ID NO: 310823 - DNA, 21 bp, Artificial sequence
  SiRNA target sequence
taccaatattttattgttctg

SEQ ID NO: 310824 - DNA, 21 bp, Artificial sequence
  SiRNA target sequence
accaatattttattgttctgc

SEQ ID NO: 310825 - DNA, 21 bp, Artificial sequence
  SiRNA target sequence
ccaatattttattgttctgcg

SEQ ID NO: 310826 - DNA, 21 bp, Artificial sequence
  SiRNA target sequence
caatattttattgttctgcga

SEQ ID NO: 310827 - DNA, 21 bp, Artificial sequence
  SiRNA target sequence
aatattttattgttctgcgag

SEQ ID NO: 310828 - DNA, 21 bp, Artificial sequence
  SiRNA target sequence
atattttattgttctgcgagg

SEQ ID NO: 310829 - DNA, 21 bp, Artificial sequence
  SiRNA target sequence
tattttattgttctgcgagga

SEQ ID NO: 310830 - DNA, 21 bp, Artificial sequence
  SiRNA target sequence
attttattgttctgcgaggat

SEQ ID NO: 310831 - DNA, 21 bp, Artificial sequence
  SiRNA target sequence
ttttattgttctgcgaggata

SEQ ID NO: 310832 - DNA, 21 bp, Artificial sequence
  SiRNA target sequence
tttattgttctgcgaggatat

SEQ ID NO: 310833 - DNA, 21 bp, Artificial sequence
  SiRNA target sequence
ttattgttctgcgaggatatg

SEQ ID NO: 310834 - DNA, 21 bp, Artificial sequence
  SiRNA target sequence
tattgttctgcgaggatatga

SEQ ID NO: 310835 - DNA, 21 bp, Artificial sequence
  SiRNA target sequence
attgttctgcgaggatatgat

SEQ ID NO: 310836 - DNA, 21 bp, Artificial sequence
  SiRNA target sequence
ttgttctgcgaggatatgatc

SEQ ID NO: 310837 - DNA, 21 bp, Artificial sequence
  SiRNA target sequence
tgttctgcgaggatatgatct

SEQ ID NO: 310838 - DNA, 21 bp, Artificial sequence
  SiRNA target sequence
gttctgcgaggatatgatctg

SEQ ID NO: 310839 - DNA, 21 bp, Artificial sequence
  SiRNA target sequence
ttctgcgaggatatgatctga

SEQ ID NO: 310840 - DNA, 21 bp, Artificial sequence
  SiRNA target sequence
tctgcgaggatatgatctgag

SEQ ID NO: 310841 - DNA, 21 bp, Artificial sequence
  SiRNA target sequence
ctgcgaggatatgatctgagg

SEQ ID NO: 310842 - DNA, 21 bp, Artificial sequence
  SiRNA target sequence
tgcgaggatatgatctgagga

SEQ ID NO: 310843 - DNA, 21 bp, Artificial sequence
  SiRNA target sequence
gcgaggatatgatctgaggat

SEQ ID NO: 310844 - DNA, 21 bp, Artificial sequence
  SiRNA target sequence
cgaggatatgatctgaggatg

SEQ ID NO: 310845 - DNA, 21 bp, Artificial sequence
  SiRNA target sequence
gaggatatgatctgaggatga

SEQ ID NO: 310846 - DNA, 21 bp, Artificial sequence
  SiRNA target sequence
aggatatgatctgaggatgat

SEQ ID NO: 310847 - DNA, 21 bp, Artificial sequence
  SiRNA target sequence
ggatatgatctgaggatgata

SEQ ID NO: 310848 - DNA, 21 bp, Artificial sequence
  SiRNA target sequence
gatatgatctgaggatgataa

SEQ ID NO: 310849 - DNA, 21 bp, Artificial sequence
  SiRNA target sequence
atatgatctgaggatgataat

SEQ ID NO: 310850 - DNA, 21 bp, Artificial sequence
  SiRNA target sequence
tatgatctgaggatgataata

SEQ ID NO: 310851 - DNA, 21 bp, Artificial sequence
  SiRNA target sequence
atgatctgaggatgataatag

SEQ ID NO: 310852 - DNA, 21 bp, Artificial sequence
  SiRNA target sequence
tgatctgaggatgataatagt

SEQ ID NO: 310853 - DNA, 21 bp, Artificial sequence
  SiRNA target sequence
gatctgaggatgataatagtg

SEQ ID NO: 310854 - DNA, 21 bp, Artificial sequence
  SiRNA target sequence
atctgaggatgataatagtgg

SEQ ID NO: 310855 - DNA, 21 bp, Artificial sequence
  SiRNA target sequence
tctgaggatgataatagtggt

SEQ ID NO: 310856 - DNA, 21 bp, Artificial sequence
  SiRNA target sequence
ctgaggatgataatagtggtg

SEQ ID NO: 310857 - DNA, 21 bp, Artificial sequence
  SiRNA target sequence
tgaggatgataatagtggtgc

SEQ ID NO: 310858 - DNA, 21 bp, Artificial sequence
  SiRNA target sequence
gaggatgataatagtggtgca

SEQ ID NO: 310859 - DNA, 21 bp, Artificial sequence
  SiRNA target sequence
aggatgataatagtggtgcat

SEQ ID NO: 310860 - DNA, 21 bp, Artificial sequence
  SiRNA target sequence
ggatgataatagtggtgcatg

SEQ ID NO: 310861 - DNA, 21 bp, Artificial sequence
  SiRNA target sequence
gatgataatagtggtgcatgg

SEQ ID NO: 310862 - DNA, 21 bp, Artificial sequence
  SiRNA target sequence
atgataatagtggtgcatggc

SEQ ID NO: 310863 - DNA, 21 bp, Artificial sequence
  SiRNA target sequence
tgataatagtggtgcatggcc

SEQ ID NO: 310864 - DNA, 21 bp, Artificial sequence
  SiRNA target sequence
gataatagtggtgcatggccg

SEQ ID NO: 310865 - DNA, 21 bp, Artificial sequence
  SiRNA target sequence
ataatagtggtgcatggccgt

SEQ ID NO: 310866 - DNA, 21 bp, Artificial sequence
  SiRNA target sequence
taatagtggtgcatggccgtt

SEQ ID NO: 310867 - DNA, 21 bp, Artificial sequence
  SiRNA target sequence
aatagtggtgcatggccgttt

SEQ ID NO: 310868 - DNA, 21 bp, Artificial sequence
  SiRNA target sequence
atagtggtgcatggccgtttt

SEQ ID NO: 310869 - DNA, 21 bp, Artificial sequence
  SiRNA target sequence
tagtggtgcatggccgttttc

SEQ ID NO: 310870 - DNA, 21 bp, Artificial sequence
  SiRNA target sequence
agtggtgcatggccgttttca

SEQ ID NO: 310871 - DNA, 21 bp, Artificial sequence
  SiRNA target sequence
gtggtgcatggccgttttcaa

SEQ ID NO: 310872 - DNA, 21 bp, Artificial sequence
  SiRNA target sequence
tggtgcatggccgttttcaat

SEQ ID NO: 310873 - DNA, 21 bp, Artificial sequence
  SiRNA target sequence
ggtgcatggccgttttcaatg

SEQ ID NO: 310874 - DNA, 21 bp, Artificial sequence
  SiRNA target sequence
gtgcatggccgttttcaatgg

SEQ ID NO: 310875 - DNA, 21 bp, Artificial sequence
  SiRNA target sequence
tgcatggccgttttcaatgga

SEQ ID NO: 310876 - DNA, 21 bp, Artificial sequence
  SiRNA target sequence
gcatggccgttttcaatggat

SEQ ID NO: 310877 - DNA, 21 bp, Artificial sequence
  SiRNA target sequence
catggccgttttcaatggatg

SEQ ID NO: 310878 - DNA, 21 bp, Artificial sequence
  SiRNA target sequence
atggccgttttcaatggatgc

SEQ ID NO: 310879 - DNA, 21 bp, Artificial sequence
  SiRNA target sequence
tggccgttttcaatggatgct

SEQ ID NO: 310880 - DNA, 21 bp, Artificial sequence
  SiRNA target sequence
ggccgttttcaatggatgctg

SEQ ID NO: 310881 - DNA, 21 bp, Artificial sequence
  SiRNA target sequence
gccgttttcaatggatgctgt

SEQ ID NO: 310882 - DNA, 21 bp, Artificial sequence
  SiRNA target sequence
ccgttttcaatggatgctgtg

SEQ ID NO: 310883 - DNA, 21 bp, Artificial sequence
  SiRNA target sequence
cgttttcaatggatgctgtga

SEQ ID NO: 310884 - DNA, 21 bp, Artificial sequence
  SiRNA target sequence
tgccgacgatgtgatatgaga

SEQ ID NO: 310885 - DNA, 21 bp, Artificial sequence
  SiRNA target sequence
gccgacgatgtgatatgagat

SEQ ID NO: 310886 - DNA, 21 bp, Artificial sequence
  SiRNA target sequence
ccgacgatgtgatatgagatg

SEQ ID NO: 310887 - DNA, 21 bp, Artificial sequence
  SiRNA target sequence
cgacgatgtgatatgagatgt

SEQ ID NO: 310888 - DNA, 21 bp, Artificial sequence
  SiRNA target sequence
gacgatgtgatatgagatgtt

SEQ ID NO: 310889 - DNA, 21 bp, Artificial sequence
  SiRNA target sequence
acgatgtgatatgagatgttg

SEQ ID NO: 310890 - DNA, 21 bp, Artificial sequence
  SiRNA target sequence
cgatgtgatatgagatgttgt

SEQ ID NO: 310891 - DNA, 21 bp, Artificial sequence
  SiRNA target sequence
gatgtgatatgagatgttgta

SEQ ID NO: 310892 - DNA, 21 bp, Artificial sequence
  SiRNA target sequence
atgtgatatgagatgttgtat

SEQ ID NO: 310893 - DNA, 21 bp, Artificial sequence
  SiRNA target sequence
tgtgatatgagatgttgtatt

SEQ ID NO: 310894 - DNA, 21 bp, Artificial sequence
  SiRNA target sequence
gtgatatgagatgttgtatta

SEQ ID NO: 310895 - DNA, 21 bp, Artificial sequence
  SiRNA target sequence
tgatatgagatgttgtattac

SEQ ID NO: 310896 - DNA, 21 bp, Artificial sequence
  SiRNA target sequence
gatatgagatgttgtattaca

SEQ ID NO: 310897 - DNA, 21 bp, Artificial sequence
  SiRNA target sequence
atatgagatgttgtattacat

SEQ ID NO: 310898 - DNA, 21 bp, Artificial sequence
  SiRNA target sequence
tatgagatgttgtattacatt

SEQ ID NO: 310899 - DNA, 21 bp, Artificial sequence
  SiRNA target sequence
atgagatgttgtattacatta

SEQ ID NO: 310900 - DNA, 21 bp, Artificial sequence
  SiRNA target sequence
tgagatgttgtattacattat

SEQ ID NO: 310901 - DNA, 21 bp, Artificial sequence
  SiRNA target sequence
gagatgttgtattacattata

SEQ ID NO: 310902 - DNA, 21 bp, Artificial sequence
  SiRNA target sequence
agatgttgtattacattatag

SEQ ID NO: 310903 - DNA, 21 bp, Artificial sequence
  SiRNA target sequence
gatgttgtattacattataga

SEQ ID NO: 310904 - DNA, 21 bp, Artificial sequence
  SiRNA target sequence
atgttgtattacattatagaa

SEQ ID NO: 310905 - DNA, 21 bp, Artificial sequence
  SiRNA target sequence
tgttgtattacattatagaaa

SEQ ID NO: 310906 - DNA, 21 bp, Artificial sequence
  SiRNA target sequence
gttgtattacattatagaaat

SEQ ID NO: 310907 - DNA, 21 bp, Artificial sequence
  SiRNA target sequence
ttgtattacattatagaaatt

SEQ ID NO: 310908 - DNA, 21 bp, Artificial sequence
  SiRNA target sequence
tgtattacattatagaaatta

SEQ ID NO: 310909 - DNA, 21 bp, Artificial sequence
  SiRNA target sequence
gtattacattatagaaattag

SEQ ID NO: 310910 - DNA, 21 bp, Artificial sequence
  SiRNA target sequence
tattacattatagaaattaga

SEQ ID NO: 310911 - DNA, 21 bp, Artificial sequence
  SiRNA target sequence
attacattatagaaattagag

SEQ ID NO: 310912 - DNA, 21 bp, Artificial sequence
  SiRNA target sequence
ttacattatagaaattagagt

SEQ ID NO: 310913 - DNA, 21 bp, Artificial sequence
  SiRNA target sequence
tacattatagaaattagagtt

SEQ ID NO: 310914 - DNA, 21 bp, Artificial sequence
  SiRNA target sequence
acattatagaaattagagttt

SEQ ID NO: 310915 - DNA, 21 bp, Artificial sequence
  SiRNA target sequence
cattatagaaattagagtttt

SEQ ID NO: 310916 - DNA, 21 bp, Artificial sequence
  SiRNA target sequence
attatagaaattagagttttt

SEQ ID NO: 310917 - DNA, 21 bp, Artificial sequence
  SiRNA target sequence
ttatagaaattagagtttttt

SEQ ID NO: 310918 - DNA, 21 bp, Artificial sequence
  SiRNA target sequence
tatagaaattagagttttttg

SEQ ID NO: 310919 - DNA, 21 bp, Artificial sequence
  SiRNA target sequence
atagaaattagagttttttgg

SEQ ID NO: 310920 - DNA, 21 bp, Artificial sequence
  SiRNA target sequence
tagaaattagagttttttggc

SEQ ID NO: 310921 - DNA, 21 bp, Artificial sequence
  SiRNA target sequence
agaaattagagttttttggct

SEQ ID NO: 310922 - DNA, 21 bp, Artificial sequence
  SiRNA target sequence
gaaattagagttttttggctc

SEQ ID NO: 310923 - DNA, 21 bp, Artificial sequence
  SiRNA target sequence
aaattagagttttttggctct

SEQ ID NO: 310924 - DNA, 21 bp, Artificial sequence
  SiRNA target sequence
aattagagttttttggctctg

SEQ ID NO: 310925 - DNA, 21 bp, Artificial sequence
  SiRNA target sequence
attagagttttttggctctgg

SEQ ID NO: 310926 - DNA, 21 bp, Artificial sequence
  SiRNA target sequence
ttagagttttttggctctggg

SEQ ID NO: 310927 - DNA, 21 bp, Artificial sequence
  SiRNA target sequence
tagagttttttggctctgggg

SEQ ID NO: 310928 - DNA, 21 bp, Artificial sequence
  SiRNA target sequence
agagttttttggctctgggga

SEQ ID NO: 310929 - DNA, 21 bp, Artificial sequence
  SiRNA target sequence
gagttttttggctctggggat

SEQ ID NO: 310930 - DNA, 21 bp, Artificial sequence
  SiRNA target sequence
agttttttggctctggggata

SEQ ID NO: 310931 - DNA, 21 bp, Artificial sequence
  SiRNA target sequence
gttttttggctctggggatag

SEQ ID NO: 310932 - DNA, 21 bp, Artificial sequence
  SiRNA target sequence
ttttttggctctggggatagt

SEQ ID NO: 310933 - DNA, 21 bp, Artificial sequence
  SiRNA target sequence
tttttggctctggggatagta

SEQ ID NO: 310934 - DNA, 21 bp, Artificial sequence
  SiRNA target sequence
ttttggctctggggatagtat

SEQ ID NO: 310935 - DNA, 21 bp, Artificial sequence
  SiRNA target sequence
tttggctctggggatagtatg

SEQ ID NO: 310936 - DNA, 21 bp, Artificial sequence
  SiRNA target sequence
ttggctctggggatagtatga

SEQ ID NO: 310937 - DNA, 21 bp, Artificial sequence
  SiRNA target sequence
tggctctggggatagtatgat

SEQ ID NO: 310938 - DNA, 21 bp, Artificial sequence
  SiRNA target sequence
ggctctggggatagtatgatc

SEQ ID NO: 310939 - DNA, 21 bp, Artificial sequence
  SiRNA target sequence
gctctggggatagtatgatcg

SEQ ID NO: 310940 - DNA, 21 bp, Artificial sequence
  SiRNA target sequence
ctctggggatagtatgatcgc

SEQ ID NO: 310941 - DNA, 21 bp, Artificial sequence
  SiRNA target sequence
tctggggatagtatgatcgca

SEQ ID NO: 310942 - DNA, 21 bp, Artificial sequence
  SiRNA target sequence
ctggggatagtatgatcgcaa

SEQ ID NO: 310943 - DNA, 21 bp, Artificial sequence
  SiRNA target sequence
tggggatagtatgatcgcaag

SEQ ID NO: 310944 - DNA, 21 bp, Artificial sequence
  SiRNA target sequence
ggggatagtatgatcgcaaga

SEQ ID NO: 310945 - DNA, 21 bp, Artificial sequence
  SiRNA target sequence
gggatagtatgatcgcaagat

SEQ ID NO: 310946 - DNA, 21 bp, Artificial sequence
  SiRNA target sequence
ggatagtatgatcgcaagatt

SEQ ID NO: 310947 - DNA, 21 bp, Artificial sequence
  SiRNA target sequence
gatagtatgatcgcaagattg

SEQ ID NO: 310948 - DNA, 21 bp, Artificial sequence
  SiRNA target sequence
atagtatgatcgcaagattga

SEQ ID NO: 310949 - DNA, 21 bp, Artificial sequence
  SiRNA target sequence
tagtatgatcgcaagattgaa

SEQ ID NO: 310950 - DNA, 21 bp, Artificial sequence
  SiRNA target sequence
agtatgatcgcaagattgaaa

SEQ ID NO: 310951 - DNA, 21 bp, Artificial sequence
  SiRNA target sequence
gtatgatcgcaagattgaaaa

SEQ ID NO: 310952 - DNA, 21 bp, Artificial sequence
  SiRNA target sequence
tatgatcgcaagattgaaaat

SEQ ID NO: 310953 - DNA, 21 bp, Artificial sequence
  SiRNA target sequence
atgatcgcaagattgaaaatt

SEQ ID NO: 310954 - DNA, 21 bp, Artificial sequence
  SiRNA target sequence
tgatcgcaagattgaaaatta

SEQ ID NO: 310955 - DNA, 21 bp, Artificial sequence
  SiRNA target sequence
gatcgcaagattgaaaattaa

SEQ ID NO: 310956 - DNA, 21 bp, Artificial sequence
  SiRNA target sequence
atcgcaagattgaaaattaaa

SEQ ID NO: 310957 - DNA, 21 bp, Artificial sequence
  SiRNA target sequence
tcgcaagattgaaaattaaag

SEQ ID NO: 310958 - DNA, 21 bp, Artificial sequence
  SiRNA target sequence
cgcaagattgaaaattaaaga

SEQ ID NO: 310959 - DNA, 21 bp, Artificial sequence
  SiRNA target sequence
gcaagattgaaaattaaagaa

SEQ ID NO: 310960 - DNA, 21 bp, Artificial sequence
  SiRNA target sequence
caagattgaaaattaaagaaa

SEQ ID NO: 310961 - DNA, 21 bp, Artificial sequence
  SiRNA target sequence
aagattgaaaattaaagaaat

SEQ ID NO: 310962 - DNA, 21 bp, Artificial sequence
  SiRNA target sequence
agattgaaaattaaagaaatt

SEQ ID NO: 310963 - DNA, 21 bp, Artificial sequence
  SiRNA target sequence
gattgaaaattaaagaaattg

SEQ ID NO: 310964 - DNA, 21 bp, Artificial sequence
  SiRNA target sequence
attgaaaattaaagaaattga

SEQ ID NO: 310965 - DNA, 21 bp, Artificial sequence
  SiRNA target sequence
ttgaaaattaaagaaattgac

SEQ ID NO: 310966 - DNA, 21 bp, Artificial sequence
  SiRNA target sequence
tgaaaattaaagaaattgacg

SEQ ID NO: 310967 - DNA, 21 bp, Artificial sequence
  SiRNA target sequence
gaaaattaaagaaattgacgg

SEQ ID NO: 310968 - DNA, 21 bp, Artificial sequence
  SiRNA target sequence
aaaattaaagaaattgacgga

SEQ ID NO: 310969 - DNA, 21 bp, Artificial sequence
  SiRNA target sequence
aaattaaagaaattgacggaa

SEQ ID NO: 310970 - DNA, 21 bp, Artificial sequence
  SiRNA target sequence
aattaaagaaattgacggaag

SEQ ID NO: 310971 - DNA, 21 bp, Artificial sequence
  SiRNA target sequence
attaaagaaattgacggaaga

SEQ ID NO: 310972 - DNA, 21 bp, Artificial sequence
  SiRNA target sequence
ttaaagaaattgacggaagaa

SEQ ID NO: 310973 - DNA, 21 bp, Artificial sequence
  SiRNA target sequence
taaagaaattgacggaagaat

SEQ ID NO: 310974 - DNA, 21 bp, Artificial sequence
  SiRNA target sequence
aaagaaattgacggaagaata

SEQ ID NO: 310975 - DNA, 21 bp, Artificial sequence
  SiRNA target sequence
aagaaattgacggaagaatac

SEQ ID NO: 310976 - DNA, 21 bp, Artificial sequence
  SiRNA target sequence
agaaattgacggaagaatacc

SEQ ID NO: 310977 - DNA, 21 bp, Artificial sequence
  SiRNA target sequence
gaaattgacggaagaatacca

SEQ ID NO: 310978 - DNA, 21 bp, Artificial sequence
  SiRNA target sequence
aaattgacggaagaataccac

SEQ ID NO: 310979 - DNA, 21 bp, Artificial sequence
  SiRNA target sequence
aattgacggaagaataccaca

SEQ ID NO: 310980 - DNA, 21 bp, Artificial sequence
  SiRNA target sequence
attgacggaagaataccacaa

SEQ ID NO: 310981 - DNA, 21 bp, Artificial sequence
  SiRNA target sequence
ttgacggaagaataccacaag

SEQ ID NO: 310982 - DNA, 21 bp, Artificial sequence
  SiRNA target sequence
tgacggaagaataccacaagg

SEQ ID NO: 310983 - DNA, 21 bp, Artificial sequence
  SiRNA target sequence
gacggaagaataccacaagga

SEQ ID NO: 310984 - DNA, 21 bp, Artificial sequence
  SiRNA target sequence
acggaagaataccacaaggag

SEQ ID NO: 310985 - DNA, 21 bp, Artificial sequence
  SiRNA target sequence
cggaagaataccacaaggagt

SEQ ID NO: 310986 - DNA, 21 bp, Artificial sequence
  SiRNA target sequence
ggaagaataccacaaggagtg

SEQ ID NO: 310987 - DNA, 21 bp, Artificial sequence
  SiRNA target sequence
gaagaataccacaaggagtgg

SEQ ID NO: 310988 - DNA, 21 bp, Artificial sequence
  SiRNA target sequence
aagaataccacaaggagtgga

SEQ ID NO: 310989 - DNA, 21 bp, Artificial sequence
  SiRNA target sequence
agaataccacaaggagtggat

SEQ ID NO: 310990 - DNA, 21 bp, Artificial sequence
  SiRNA target sequence
gaataccacaaggagtggatt

SEQ ID NO: 310991 - DNA, 21 bp, Artificial sequence
  SiRNA target sequence
aataccacaaggagtggattg

SEQ ID NO: 310992 - DNA, 21 bp, Artificial sequence
  SiRNA target sequence
ataccacaaggagtggattgt

SEQ ID NO: 310993 - DNA, 21 bp, Artificial sequence
  SiRNA target sequence
taccacaaggagtggattgtg

SEQ ID NO: 310994 - DNA, 21 bp, Artificial sequence
  SiRNA target sequence
accacaaggagtggattgtgc

SEQ ID NO: 310995 - DNA, 21 bp, Artificial sequence
  SiRNA target sequence
ccacaaggagtggattgtgcg

SEQ ID NO: 310996 - DNA, 21 bp, Artificial sequence
  SiRNA target sequence
cacaaggagtggattgtgcgg

SEQ ID NO: 310997 - DNA, 21 bp, Artificial sequence
  SiRNA target sequence
acaaggagtggattgtgcggc

SEQ ID NO: 310998 - DNA, 21 bp, Artificial sequence
  SiRNA target sequence
caaggagtggattgtgcggct

SEQ ID NO: 310999 - DNA, 21 bp, Artificial sequence
  SiRNA target sequence
aaggagtggattgtgcggctt

SEQ ID NO: 311000 - DNA, 21 bp, Artificial sequence
  SiRNA target sequence
aggagtggattgtgcggctta

SEQ ID NO: 311001 - DNA, 21 bp, Artificial sequence
  SiRNA target sequence
ggagtggattgtgcggcttaa

SEQ ID NO: 311002 - DNA, 21 bp, Artificial sequence
  SiRNA target sequence
gagtggattgtgcggcttaat

SEQ ID NO: 311003 - DNA, 21 bp, Artificial sequence
  SiRNA target sequence
agtggattgtgcggcttaatt

SEQ ID NO: 311004 - DNA, 21 bp, Artificial sequence
  SiRNA target sequence
gtggattgtgcggcttaattt

SEQ ID NO: 311005 - DNA, 21 bp, Artificial sequence
  SiRNA target sequence
tggattgtgcggcttaatttg

SEQ ID NO: 311006 - DNA, 21 bp, Artificial sequence
  SiRNA target sequence
ggattgtgcggcttaatttga

SEQ ID NO: 311007 - DNA, 21 bp, Artificial sequence
  SiRNA target sequence
gattgtgcggcttaatttgac

SEQ ID NO: 311008 - DNA, 21 bp, Artificial sequence
  SiRNA target sequence
attgtgcggcttaatttgact

SEQ ID NO: 311009 - DNA, 21 bp, Artificial sequence
  SiRNA target sequence
ttgtgcggcttaatttgactc

SEQ ID NO: 311010 - DNA, 21 bp, Artificial sequence
  SiRNA target sequence
tgtgcggcttaatttgactca

SEQ ID NO: 311011 - DNA, 21 bp, Artificial sequence
  SiRNA target sequence
gtgcggcttaatttgactcaa

SEQ ID NO: 311012 - DNA, 21 bp, Artificial sequence
  SiRNA target sequence
tgcggcttaatttgactcaac

SEQ ID NO: 311013 - DNA, 21 bp, Artificial sequence
  SiRNA target sequence
gcggcttaatttgactcaacg

SEQ ID NO: 311014 - DNA, 21 bp, Artificial sequence
  SiRNA target sequence
cggcttaatttgactcaacgc

SEQ ID NO: 311015 - DNA, 21 bp, Artificial sequence
  SiRNA target sequence
ggcttaatttgactcaacgcg

SEQ ID NO: 311016 - DNA, 21 bp, Artificial sequence
  SiRNA target sequence
gcttaatttgactcaacgcga

SEQ ID NO: 311017 - DNA, 21 bp, Artificial sequence
  SiRNA target sequence
cttaatttgactcaacgcgag

SEQ ID NO: 311018 - DNA, 21 bp, Artificial sequence
  SiRNA target sequence
ttaatttgactcaacgcgagg

SEQ ID NO: 311019 - DNA, 21 bp, Artificial sequence
  SiRNA target sequence
taatttgactcaacgcgaggt

SEQ ID NO: 311020 - DNA, 21 bp, Artificial sequence
  SiRNA target sequence
aatttgactcaacgcgaggta

SEQ ID NO: 311021 - DNA, 21 bp, Artificial sequence
  SiRNA target sequence
atttgactcaacgcgaggtaa

SEQ ID NO: 311022 - DNA, 21 bp, Artificial sequence
  SiRNA target sequence
tttgactcaacgcgaggtaac

SEQ ID NO: 311023 - DNA, 21 bp, Artificial sequence
  SiRNA target sequence
ttgactcaacgcgaggtaact

SEQ ID NO: 311024 - DNA, 21 bp, Artificial sequence
  SiRNA target sequence
tgactcaacgcgaggtaactt

SEQ ID NO: 311025 - DNA, 21 bp, Artificial sequence
  SiRNA target sequence
gactcaacgcgaggtaactta

SEQ ID NO: 311026 - DNA, 21 bp, Artificial sequence
  SiRNA target sequence
actcaacgcgaggtaacttac

SEQ ID NO: 311027 - DNA, 21 bp, Artificial sequence
  SiRNA target sequence
ctcaacgcgaggtaacttacc

SEQ ID NO: 311028 - DNA, 21 bp, Artificial sequence
  SiRNA target sequence
tcaacgcgaggtaacttacca

SEQ ID NO: 311029 - DNA, 21 bp, Artificial sequence
  SiRNA target sequence
caacgcgaggtaacttaccaa

SEQ ID NO: 311030 - DNA, 21 bp, Artificial sequence
  SiRNA target sequence
aacgcgaggtaacttaccaat

SEQ ID NO: 311031 - DNA, 21 bp, Artificial sequence
  SiRNA target sequence
acgcgaggtaacttaccaata

SEQ ID NO: 311032 - DNA, 21 bp, Artificial sequence
  SiRNA target sequence
cgcgaggtaacttaccaatat

SEQ ID NO: 311033 - DNA, 21 bp, Artificial sequence
  SiRNA target sequence
gcgaggtaacttaccaatatt

SEQ ID NO: 311034 - DNA, 21 bp, Artificial sequence
  SiRNA target sequence
cgaggtaacttaccaatattt

SEQ ID NO: 311035 - DNA, 21 bp, Artificial sequence
  SiRNA target sequence
gaggtaacttaccaatatttt

SEQ ID NO: 311036 - DNA, 21 bp, Artificial sequence
  SiRNA target sequence
aggtaacttaccaatatttta

SEQ ID NO: 311037 - DNA, 21 bp, Artificial sequence
  SiRNA target sequence
ggtaacttaccaatattttat

SEQ ID NO: 311038 - DNA, 21 bp, Artificial sequence
  SiRNA target sequence
gtaacttaccaatattttatt

SEQ ID NO: 311039 - DNA, 21 bp, Artificial sequence
  SiRNA target sequence
taacttaccaatattttattg

SEQ ID NO: 311040 - DNA, 21 bp, Artificial sequence
  SiRNA target sequence
aacttaccaatattttattgt

SEQ ID NO: 311041 - DNA, 21 bp, Artificial sequence
  SiRNA target sequence
acttaccaatattttattgtt

SEQ ID NO: 311042 - DNA, 21 bp, Artificial sequence
  SiRNA target sequence
cttaccaatattttattgttc

SEQ ID NO: 311043 - DNA, 21 bp, Artificial sequence
  SiRNA target sequence
ttaccaatattttattgttct

SEQ ID NO: 311044 - DNA, 21 bp, Artificial sequence
  SiRNA target sequence
taccaatattttattgttctg

SEQ ID NO: 311045 - DNA, 21 bp, Artificial sequence
  SiRNA target sequence
accaatattttattgttctgc

SEQ ID NO: 311046 - DNA, 21 bp, Artificial sequence
  SiRNA target sequence
ccaatattttattgttctgcg

SEQ ID NO: 311047 - DNA, 21 bp, Artificial sequence
  SiRNA target sequence
caatattttattgttctgcga

SEQ ID NO: 311048 - DNA, 21 bp, Artificial sequence
  SiRNA target sequence
aatattttattgttctgcgag

SEQ ID NO: 311049 - DNA, 21 bp, Artificial sequence
  SiRNA target sequence
atattttattgttctgcgagg

SEQ ID NO: 311050 - DNA, 21 bp, Artificial sequence
  SiRNA target sequence
tattttattgttctgcgagga

SEQ ID NO: 311051 - DNA, 21 bp, Artificial sequence
  SiRNA target sequence
attttattgttctgcgaggat

SEQ ID NO: 311052 - DNA, 21 bp, Artificial sequence
  SiRNA target sequence
ttttattgttctgcgaggata

SEQ ID NO: 311053 - DNA, 21 bp, Artificial sequence
  SiRNA target sequence
tttattgttctgcgaggatat

SEQ ID NO: 311054 - DNA, 21 bp, Artificial sequence
  SiRNA target sequence
ttattgttctgcgaggatatg

SEQ ID NO: 311055 - DNA, 21 bp, Artificial sequence
  SiRNA target sequence
tattgttctgcgaggatatga

SEQ ID NO: 311056 - DNA, 21 bp, Artificial sequence
  SiRNA target sequence
attgttctgcgaggatatgat

SEQ ID NO: 311057 - DNA, 21 bp, Artificial sequence
  SiRNA target sequence
ttgttctgcgaggatatgatc

SEQ ID NO: 311058 - DNA, 21 bp, Artificial sequence
  SiRNA target sequence
tgttctgcgaggatatgatct

SEQ ID NO: 311059 - DNA, 21 bp, Artificial sequence
  SiRNA target sequence
gttctgcgaggatatgatctg

SEQ ID NO: 311060 - DNA, 21 bp, Artificial sequence
  SiRNA target sequence
ttctgcgaggatatgatctga

SEQ ID NO: 311061 - DNA, 21 bp, Artificial sequence
  SiRNA target sequence
tctgcgaggatatgatctgag

SEQ ID NO: 311062 - DNA, 21 bp, Artificial sequence
  SiRNA target sequence
ctgcgaggatatgatctgagg

SEQ ID NO: 311063 - DNA, 21 bp, Artificial sequence
  SiRNA target sequence
tgcgaggatatgatctgagga

SEQ ID NO: 311064 - DNA, 21 bp, Artificial sequence
  SiRNA target sequence
gcgaggatatgatctgaggat

SEQ ID NO: 311065 - DNA, 21 bp, Artificial sequence
  SiRNA target sequence
cgaggatatgatctgaggatg

SEQ ID NO: 311066 - DNA, 21 bp, Artificial sequence
  SiRNA target sequence
gaggatatgatctgaggatga

SEQ ID NO: 311067 - DNA, 21 bp, Artificial sequence
  SiRNA target sequence
aggatatgatctgaggatgat

SEQ ID NO: 311068 - DNA, 21 bp, Artificial sequence
  SiRNA target sequence
ggatatgatctgaggatgata

SEQ ID NO: 311069 - DNA, 21 bp, Artificial sequence
  SiRNA target sequence
gatatgatctgaggatgataa

SEQ ID NO: 311070 - DNA, 21 bp, Artificial sequence
  SiRNA target sequence
atatgatctgaggatgataat

SEQ ID NO: 311071 - DNA, 21 bp, Artificial sequence
  SiRNA target sequence
tatgatctgaggatgataata

SEQ ID NO: 311072 - DNA, 21 bp, Artificial sequence
  SiRNA target sequence
atgatctgaggatgataatag

SEQ ID NO: 311073 - DNA, 21 bp, Artificial sequence
  SiRNA target sequence
tgatctgaggatgataatagt

SEQ ID NO: 311074 - DNA, 21 bp, Artificial sequence
  SiRNA target sequence
gatctgaggatgataatagtg

SEQ ID NO: 311075 - DNA, 21 bp, Artificial sequence
  SiRNA target sequence
atctgaggatgataatagtgg

SEQ ID NO: 311076 - DNA, 21 bp, Artificial sequence
  SiRNA target sequence
tctgaggatgataatagtggt

SEQ ID NO: 311077 - DNA, 21 bp, Artificial sequence
  SiRNA target sequence
ctgaggatgataatagtggtg

SEQ ID NO: 311078 - DNA, 21 bp, Artificial sequence
  SiRNA target sequence
tgaggatgataatagtggtgc

SEQ ID NO: 311079 - DNA, 21 bp, Artificial sequence
  SiRNA target sequence
gaggatgataatagtggtgca

SEQ ID NO: 311080 - DNA, 21 bp, Artificial sequence
  SiRNA target sequence
aggatgataatagtggtgcat

SEQ ID NO: 311081 - DNA, 21 bp, Artificial sequence
  SiRNA target sequence
ggatgataatagtggtgcatg

SEQ ID NO: 311082 - DNA, 21 bp, Artificial sequence
  SiRNA target sequence
gatgataatagtggtgcatgg

SEQ ID NO: 311083 - DNA, 21 bp, Artificial sequence
  SiRNA target sequence
atgataatagtggtgcatggc

SEQ ID NO: 311084 - DNA, 21 bp, Artificial sequence
  SiRNA target sequence
tgataatagtggtgcatggcc

SEQ ID NO: 311085 - DNA, 21 bp, Artificial sequence
  SiRNA target sequence
gataatagtggtgcatggccg

SEQ ID NO: 311086 - DNA, 21 bp, Artificial sequence
  SiRNA target sequence
ataatagtggtgcatggccgt

SEQ ID NO: 311087 - DNA, 21 bp, Artificial sequence
  SiRNA target sequence
taatagtggtgcatggccgtt

SEQ ID NO: 311088 - DNA, 21 bp, Artificial sequence
  SiRNA target sequence
aatagtggtgcatggccgttt

SEQ ID NO: 311089 - DNA, 21 bp, Artificial sequence
  SiRNA target sequence
atagtggtgcatggccgtttt

SEQ ID NO: 311090 - DNA, 21 bp, Artificial sequence
  SiRNA target sequence
tagtggtgcatggccgttttc

SEQ ID NO: 311091 - DNA, 21 bp, Artificial sequence
  SiRNA target sequence
agtggtgcatggccgttttca

SEQ ID NO: 311092 - DNA, 21 bp, Artificial sequence
  SiRNA target sequence
gtggtgcatggccgttttcaa

SEQ ID NO: 311093 - DNA, 21 bp, Artificial sequence
  SiRNA target sequence
tggtgcatggccgttttcaat

SEQ ID NO: 311094 - DNA, 21 bp, Artificial sequence
  SiRNA target sequence
ggtgcatggccgttttcaatg

SEQ ID NO: 311095 - DNA, 21 bp, Artificial sequence
  SiRNA target sequence
gtgcatggccgttttcaatgg

SEQ ID NO: 311096 - DNA, 21 bp, Artificial sequence
  SiRNA target sequence
tgcatggccgttttcaatgga

SEQ ID NO: 311097 - DNA, 21 bp, Artificial sequence
  SiRNA target sequence
gcatggccgttttcaatggat

SEQ ID NO: 311098 - DNA, 21 bp, Artificial sequence
  SiRNA target sequence
catggccgttttcaatggatg

SEQ ID NO: 311099 - DNA, 21 bp, Artificial sequence
  SiRNA target sequence
atggccgttttcaatggatgc

SEQ ID NO: 311100 - DNA, 21 bp, Artificial sequence
  SiRNA target sequence
tggccgttttcaatggatgct

SEQ ID NO: 311101 - DNA, 21 bp, Artificial sequence
  SiRNA target sequence
ggccgttttcaatggatgctg

SEQ ID NO: 311102 - DNA, 21 bp, Artificial sequence
  SiRNA target sequence
gccgttttcaatggatgctgt

SEQ ID NO: 311103 - DNA, 21 bp, Artificial sequence
  SiRNA target sequence
ccgttttcaatggatgctgtg

SEQ ID NO: 311104 - DNA, 21 bp, Artificial sequence
  SiRNA target sequence
cgttttcaatggatgctgtga

SEQ ID NO: 311105 - DNA, 21 bp, Artificial sequence
  SiRNA target sequence
ttgccgacgatgtgatatgag

SEQ ID NO: 311106 - DNA, 21 bp, Artificial sequence
  SiRNA target sequence
tgccgacgatgtgatatgaga

SEQ ID NO: 311107 - DNA, 21 bp, Artificial sequence
  SiRNA target sequence
gccgacgatgtgatatgagat

SEQ ID NO: 311108 - DNA, 21 bp, Artificial sequence
  SiRNA target sequence
ccgacgatgtgatatgagatg

SEQ ID NO: 311109 - DNA, 21 bp, Artificial sequence
  SiRNA target sequence
cgacgatgtgatatgagatgt

SEQ ID NO: 311110 - DNA, 21 bp, Artificial sequence
  SiRNA target sequence
gacgatgtgatatgagatgtt

SEQ ID NO: 311111 - DNA, 21 bp, Artificial sequence
  SiRNA target sequence
acgatgtgatatgagatgttg

SEQ ID NO: 311112 - DNA, 21 bp, Artificial sequence
  SiRNA target sequence
cgatgtgatatgagatgttgt

SEQ ID NO: 311113 - DNA, 21 bp, Artificial sequence
  SiRNA target sequence
gatgtgatatgagatgttgta

SEQ ID NO: 311114 - DNA, 21 bp, Artificial sequence
  SiRNA target sequence
atgtgatatgagatgttgtat

SEQ ID NO: 311115 - DNA, 21 bp, Artificial sequence
  SiRNA target sequence
tgtgatatgagatgttgtatt

SEQ ID NO: 311116 - DNA, 21 bp, Artificial sequence
  SiRNA target sequence
gtgatatgagatgttgtatta

SEQ ID NO: 311117 - DNA, 21 bp, Artificial sequence
  SiRNA target sequence
tgatatgagatgttgtattac

SEQ ID NO: 311118 - DNA, 21 bp, Artificial sequence
  SiRNA target sequence
gatatgagatgttgtattaca

SEQ ID NO: 311119 - DNA, 21 bp, Artificial sequence
  SiRNA target sequence
atatgagatgttgtattacat

SEQ ID NO: 311120 - DNA, 21 bp, Artificial sequence
  SiRNA target sequence
tatgagatgttgtattacatt

SEQ ID NO: 311121 - DNA, 21 bp, Artificial sequence
  SiRNA target sequence
atgagatgttgtattacatta

SEQ ID NO: 311122 - DNA, 21 bp, Artificial sequence
  SiRNA target sequence
tgagatgttgtattacattat

SEQ ID NO: 311123 - DNA, 21 bp, Artificial sequence
  SiRNA target sequence
gagatgttgtattacattata

SEQ ID NO: 311124 - DNA, 21 bp, Artificial sequence
  SiRNA target sequence
agatgttgtattacattatag

SEQ ID NO: 311125 - DNA, 21 bp, Artificial sequence
  SiRNA target sequence
gatgttgtattacattataga

SEQ ID NO: 311126 - DNA, 21 bp, Artificial sequence
  SiRNA target sequence
atgttgtattacattatagaa

SEQ ID NO: 311127 - DNA, 21 bp, Artificial sequence
  SiRNA target sequence
tgttgtattacattatagaaa

SEQ ID NO: 311128 - DNA, 21 bp, Artificial sequence
  SiRNA target sequence
gttgtattacattatagaaat

SEQ ID NO: 311129 - DNA, 21 bp, Artificial sequence
  SiRNA target sequence
ttgtattacattatagaaatt

SEQ ID NO: 311130 - DNA, 21 bp, Artificial sequence
  SiRNA target sequence
tgtattacattatagaaatta

SEQ ID NO: 311131 - DNA, 21 bp, Artificial sequence
  SiRNA target sequence
gtattacattatagaaattag

SEQ ID NO: 311132 - DNA, 21 bp, Artificial sequence
  SiRNA target sequence
tattacattatagaaattaga

SEQ ID NO: 311133 - DNA, 21 bp, Artificial sequence
  SiRNA target sequence
attacattatagaaattagag

SEQ ID NO: 311134 - DNA, 21 bp, Artificial sequence
  SiRNA target sequence
ttacattatagaaattagagt

SEQ ID NO: 311135 - DNA, 21 bp, Artificial sequence
  SiRNA target sequence
tacattatagaaattagagtt

SEQ ID NO: 311136 - DNA, 21 bp, Artificial sequence
  SiRNA target sequence
acattatagaaattagagttt

SEQ ID NO: 311137 - DNA, 21 bp, Artificial sequence
  SiRNA target sequence
cattatagaaattagagtttt

SEQ ID NO: 311138 - DNA, 21 bp, Artificial sequence
  SiRNA target sequence
attatagaaattagagttttt

SEQ ID NO: 311139 - DNA, 21 bp, Artificial sequence
  SiRNA target sequence
ttatagaaattagagtttttt

SEQ ID NO: 311140 - DNA, 21 bp, Artificial sequence
  SiRNA target sequence
tatagaaattagagttttttg

SEQ ID NO: 311141 - DNA, 21 bp, Artificial sequence
  SiRNA target sequence
atagaaattagagttttttgg

SEQ ID NO: 311142 - DNA, 21 bp, Artificial sequence
  SiRNA target sequence
tagaaattagagttttttggc

SEQ ID NO: 311143 - DNA, 21 bp, Artificial sequence
  SiRNA target sequence
agaaattagagttttttggct

SEQ ID NO: 311144 - DNA, 21 bp, Artificial sequence
  SiRNA target sequence
gaaattagagttttttggctc

SEQ ID NO: 311145 - DNA, 21 bp, Artificial sequence
  SiRNA target sequence
aaattagagttttttggctct

SEQ ID NO: 311146 - DNA, 21 bp, Artificial sequence
  SiRNA target sequence
aattagagttttttggctctg

SEQ ID NO: 311147 - DNA, 21 bp, Artificial sequence
  SiRNA target sequence
attagagttttttggctctgg

SEQ ID NO: 311148 - DNA, 21 bp, Artificial sequence
  SiRNA target sequence
ttagagttttttggctctggg

SEQ ID NO: 311149 - DNA, 21 bp, Artificial sequence
  SiRNA target sequence
tagagttttttggctctgggg

SEQ ID NO: 311150 - DNA, 21 bp, Artificial sequence
  SiRNA target sequence
agagttttttggctctgggga

SEQ ID NO: 311151 - DNA, 21 bp, Artificial sequence
  SiRNA target sequence
gagttttttggctctggggat

SEQ ID NO: 311152 - DNA, 21 bp, Artificial sequence
  SiRNA target sequence
agttttttggctctggggata

SEQ ID NO: 311153 - DNA, 21 bp, Artificial sequence
  SiRNA target sequence
gttttttggctctggggatag

SEQ ID NO: 311154 - DNA, 21 bp, Artificial sequence
  SiRNA target sequence
ttttttggctctggggatagt

SEQ ID NO: 311155 - DNA, 21 bp, Artificial sequence
  SiRNA target sequence
tttttggctctggggatagta

SEQ ID NO: 311156 - DNA, 21 bp, Artificial sequence
  SiRNA target sequence
ttttggctctggggatagtat

SEQ ID NO: 311157 - DNA, 21 bp, Artificial sequence
  SiRNA target sequence
tttggctctggggatagtatg

SEQ ID NO: 311158 - DNA, 21 bp, Artificial sequence
  SiRNA target sequence
ttggctctggggatagtatga

SEQ ID NO: 311159 - DNA, 21 bp, Artificial sequence
  SiRNA target sequence
tggctctggggatagtatgat

SEQ ID NO: 311160 - DNA, 21 bp, Artificial sequence
  SiRNA target sequence
ggctctggggatagtatgatc

SEQ ID NO: 311161 - DNA, 21 bp, Artificial sequence
  SiRNA target sequence
gctctggggatagtatgatcg

SEQ ID NO: 311162 - DNA, 21 bp, Artificial sequence
  SiRNA target sequence
ctctggggatagtatgatcgc

SEQ ID NO: 311163 - DNA, 21 bp, Artificial sequence
  SiRNA target sequence
tctggggatagtatgatcgca

SEQ ID NO: 311164 - DNA, 21 bp, Artificial sequence
  SiRNA target sequence
ctggggatagtatgatcgcaa

SEQ ID NO: 311165 - DNA, 21 bp, Artificial sequence
  SiRNA target sequence
tggggatagtatgatcgcaag

SEQ ID NO: 311166 - DNA, 21 bp, Artificial sequence
  SiRNA target sequence
ggggatagtatgatcgcaaga

SEQ ID NO: 311167 - DNA, 21 bp, Artificial sequence
  SiRNA target sequence
gggatagtatgatcgcaagat

SEQ ID NO: 311168 - DNA, 21 bp, Artificial sequence
  SiRNA target sequence
ggatagtatgatcgcaagatt

SEQ ID NO: 311169 - DNA, 21 bp, Artificial sequence
  SiRNA target sequence
gatagtatgatcgcaagattg

SEQ ID NO: 311170 - DNA, 21 bp, Artificial sequence
  SiRNA target sequence
atagtatgatcgcaagattga

SEQ ID NO: 311171 - DNA, 21 bp, Artificial sequence
  SiRNA target sequence
tagtatgatcgcaagattgaa

SEQ ID NO: 311172 - DNA, 21 bp, Artificial sequence
  SiRNA target sequence
agtatgatcgcaagattgaaa

SEQ ID NO: 311173 - DNA, 21 bp, Artificial sequence
  SiRNA target sequence
gtatgatcgcaagattgaaaa

SEQ ID NO: 311174 - DNA, 21 bp, Artificial sequence
  SiRNA target sequence
tatgatcgcaagattgaaaat

SEQ ID NO: 311175 - DNA, 21 bp, Artificial sequence
  SiRNA target sequence
atgatcgcaagattgaaaatt

SEQ ID NO: 311176 - DNA, 21 bp, Artificial sequence
  SiRNA target sequence
tgatcgcaagattgaaaatta

SEQ ID NO: 311177 - DNA, 21 bp, Artificial sequence
  SiRNA target sequence
gatcgcaagattgaaaattaa

SEQ ID NO: 311178 - DNA, 21 bp, Artificial sequence
  SiRNA target sequence
atcgcaagattgaaaattaaa

SEQ ID NO: 311179 - DNA, 21 bp, Artificial sequence
  SiRNA target sequence
tcgcaagattgaaaattaaag

SEQ ID NO: 311180 - DNA, 21 bp, Artificial sequence
  SiRNA target sequence
cgcaagattgaaaattaaaga

SEQ ID NO: 311181 - DNA, 21 bp, Artificial sequence
  SiRNA target sequence
gcaagattgaaaattaaagaa

SEQ ID NO: 311182 - DNA, 21 bp, Artificial sequence
  SiRNA target sequence
caagattgaaaattaaagaaa

SEQ ID NO: 311183 - DNA, 21 bp, Artificial sequence
  SiRNA target sequence
aagattgaaaattaaagaaat

SEQ ID NO: 311184 - DNA, 21 bp, Artificial sequence
  SiRNA target sequence
agattgaaaattaaagaaatt

SEQ ID NO: 311185 - DNA, 21 bp, Artificial sequence
  SiRNA target sequence
gattgaaaattaaagaaattg

SEQ ID NO: 311186 - DNA, 21 bp, Artificial sequence
  SiRNA target sequence
attgaaaattaaagaaattga

SEQ ID NO: 311187 - DNA, 21 bp, Artificial sequence
  SiRNA target sequence
ttgaaaattaaagaaattgac

SEQ ID NO: 311188 - DNA, 21 bp, Artificial sequence
  SiRNA target sequence
tgaaaattaaagaaattgacg

SEQ ID NO: 311189 - DNA, 21 bp, Artificial sequence
  SiRNA target sequence
gaaaattaaagaaattgacgg

SEQ ID NO: 311190 - DNA, 21 bp, Artificial sequence
  SiRNA target sequence
aaaattaaagaaattgacgga

SEQ ID NO: 311191 - DNA, 21 bp, Artificial sequence
  SiRNA target sequence
aaattaaagaaattgacggaa

SEQ ID NO: 311192 - DNA, 21 bp, Artificial sequence
  SiRNA target sequence
aattaaagaaattgacggaag

SEQ ID NO: 311193 - DNA, 21 bp, Artificial sequence
  SiRNA target sequence
attaaagaaattgacggaaga

SEQ ID NO: 311194 - DNA, 21 bp, Artificial sequence
  SiRNA target sequence
ttaaagaaattgacggaagaa

SEQ ID NO: 311195 - DNA, 21 bp, Artificial sequence
  SiRNA target sequence
taaagaaattgacggaagaat

SEQ ID NO: 311196 - DNA, 21 bp, Artificial sequence
  SiRNA target sequence
aaagaaattgacggaagaata

SEQ ID NO: 311197 - DNA, 21 bp, Artificial sequence
  SiRNA target sequence
aagaaattgacggaagaatac

SEQ ID NO: 311198 - DNA, 21 bp, Artificial sequence
  SiRNA target sequence
agaaattgacggaagaatacc

SEQ ID NO: 311199 - DNA, 21 bp, Artificial sequence
  SiRNA target sequence
gaaattgacggaagaatacca

SEQ ID NO: 311200 - DNA, 21 bp, Artificial sequence
  SiRNA target sequence
aaattgacggaagaataccac

SEQ ID NO: 311201 - DNA, 21 bp, Artificial sequence
  SiRNA target sequence
aattgacggaagaataccaca

SEQ ID NO: 311202 - DNA, 21 bp, Artificial sequence
  SiRNA target sequence
attgacggaagaataccacaa

SEQ ID NO: 311203 - DNA, 21 bp, Artificial sequence
  SiRNA target sequence
ttgacggaagaataccacaag

SEQ ID NO: 311204 - DNA, 21 bp, Artificial sequence
  SiRNA target sequence
tgacggaagaataccacaagg

SEQ ID NO: 311205 - DNA, 21 bp, Artificial sequence
  SiRNA target sequence
gacggaagaataccacaagga

SEQ ID NO: 311206 - DNA, 21 bp, Artificial sequence
  SiRNA target sequence
acggaagaataccacaaggag

SEQ ID NO: 311207 - DNA, 21 bp, Artificial sequence
  SiRNA target sequence
cggaagaataccacaaggagt

SEQ ID NO: 311208 - DNA, 21 bp, Artificial sequence
  SiRNA target sequence
ggaagaataccacaaggagtg

SEQ ID NO: 311209 - DNA, 21 bp, Artificial sequence
  SiRNA target sequence
gaagaataccacaaggagtgg

SEQ ID NO: 311210 - DNA, 21 bp, Artificial sequence
  SiRNA target sequence
aagaataccacaaggagtgga

SEQ ID NO: 311211 - DNA, 21 bp, Artificial sequence
  SiRNA target sequence
agaataccacaaggagtggat

SEQ ID NO: 311212 - DNA, 21 bp, Artificial sequence
  SiRNA target sequence
gaataccacaaggagtggatt

SEQ ID NO: 311213 - DNA, 21 bp, Artificial sequence
  SiRNA target sequence
aataccacaaggagtggattg

SEQ ID NO: 311214 - DNA, 21 bp, Artificial sequence
  SiRNA target sequence
ataccacaaggagtggattgt

SEQ ID NO: 311215 - DNA, 21 bp, Artificial sequence
  SiRNA target sequence
taccacaaggagtggattgtg

SEQ ID NO: 311216 - DNA, 21 bp, Artificial sequence
  SiRNA target sequence
accacaaggagtggattgtgc

SEQ ID NO: 311217 - DNA, 21 bp, Artificial sequence
  SiRNA target sequence
ccacaaggagtggattgtgcg

SEQ ID NO: 311218 - DNA, 21 bp, Artificial sequence
  SiRNA target sequence
cacaaggagtggattgtgcgg

SEQ ID NO: 311219 - DNA, 21 bp, Artificial sequence
  SiRNA target sequence
acaaggagtggattgtgcggc

SEQ ID NO: 311220 - DNA, 21 bp, Artificial sequence
  SiRNA target sequence
caaggagtggattgtgcggct

SEQ ID NO: 311221 - DNA, 21 bp, Artificial sequence
  SiRNA target sequence
aaggagtggattgtgcggctt

SEQ ID NO: 311222 - DNA, 21 bp, Artificial sequence
  SiRNA target sequence
aggagtggattgtgcggctta

SEQ ID NO: 311223 - DNA, 21 bp, Artificial sequence
  SiRNA target sequence
ggagtggattgtgcggcttaa

SEQ ID NO: 311224 - DNA, 21 bp, Artificial sequence
  SiRNA target sequence
gagtggattgtgcggcttaat

SEQ ID NO: 311225 - DNA, 21 bp, Artificial sequence
  SiRNA target sequence
agtggattgtgcggcttaatt

SEQ ID NO: 311226 - DNA, 21 bp, Artificial sequence
  SiRNA target sequence
gtggattgtgcggcttaattt

SEQ ID NO: 311227 - DNA, 21 bp, Artificial sequence
  SiRNA target sequence
tggattgtgcggcttaatttg

SEQ ID NO: 311228 - DNA, 21 bp, Artificial sequence
  SiRNA target sequence
ggattgtgcggcttaatttga

SEQ ID NO: 311229 - DNA, 21 bp, Artificial sequence
  SiRNA target sequence
gattgtgcggcttaatttgac

SEQ ID NO: 311230 - DNA, 21 bp, Artificial sequence
  SiRNA target sequence
attgtgcggcttaatttgact

SEQ ID NO: 311231 - DNA, 21 bp, Artificial sequence
  SiRNA target sequence
ttgtgcggcttaatttgactc

SEQ ID NO: 311232 - DNA, 21 bp, Artificial sequence
  SiRNA target sequence
tgtgcggcttaatttgactca

SEQ ID NO: 311233 - DNA, 21 bp, Artificial sequence
  SiRNA target sequence
gtgcggcttaatttgactcaa

SEQ ID NO: 311234 - DNA, 21 bp, Artificial sequence
  SiRNA target sequence
tgcggcttaatttgactcaac

SEQ ID NO: 311235 - DNA, 21 bp, Artificial sequence
  SiRNA target sequence
gcggcttaatttgactcaacg

SEQ ID NO: 311236 - DNA, 21 bp, Artificial sequence
  SiRNA target sequence
cggcttaatttgactcaacgc

SEQ ID NO: 311237 - DNA, 21 bp, Artificial sequence
  SiRNA target sequence
ggcttaatttgactcaacgcg

SEQ ID NO: 311238 - DNA, 21 bp, Artificial sequence
  SiRNA target sequence
gcttaatttgactcaacgcga

SEQ ID NO: 311239 - DNA, 21 bp, Artificial sequence
  SiRNA target sequence
cttaatttgactcaacgcgag

SEQ ID NO: 311240 - DNA, 21 bp, Artificial sequence
  SiRNA target sequence
ttaatttgactcaacgcgagg

SEQ ID NO: 311241 - DNA, 21 bp, Artificial sequence
  SiRNA target sequence
taatttgactcaacgcgaggt

SEQ ID NO: 311242 - DNA, 21 bp, Artificial sequence
  SiRNA target sequence
aatttgactcaacgcgaggta

SEQ ID NO: 311243 - DNA, 21 bp, Artificial sequence
  SiRNA target sequence
atttgactcaacgcgaggtaa

SEQ ID NO: 311244 - DNA, 21 bp, Artificial sequence
  SiRNA target sequence
tttgactcaacgcgaggtaac

SEQ ID NO: 311245 - DNA, 21 bp, Artificial sequence
  SiRNA target sequence
ttgactcaacgcgaggtaact

SEQ ID NO: 311246 - DNA, 21 bp, Artificial sequence
  SiRNA target sequence
tgactcaacgcgaggtaactt

SEQ ID NO: 311247 - DNA, 21 bp, Artificial sequence
  SiRNA target sequence
gactcaacgcgaggtaactta

SEQ ID NO: 311248 - DNA, 21 bp, Artificial sequence
  SiRNA target sequence
actcaacgcgaggtaacttac

SEQ ID NO: 311249 - DNA, 21 bp, Artificial sequence
  SiRNA target sequence
ctcaacgcgaggtaacttacc

SEQ ID NO: 311250 - DNA, 21 bp, Artificial sequence
  SiRNA target sequence
tcaacgcgaggtaacttacca

SEQ ID NO: 311251 - DNA, 21 bp, Artificial sequence
  SiRNA target sequence
caacgcgaggtaacttaccaa

SEQ ID NO: 311252 - DNA, 21 bp, Artificial sequence
  SiRNA target sequence
aacgcgaggtaacttaccaat

SEQ ID NO: 311253 - DNA, 21 bp, Artificial sequence
  SiRNA target sequence
acgcgaggtaacttaccaata

SEQ ID NO: 311254 - DNA, 21 bp, Artificial sequence
  SiRNA target sequence
cgcgaggtaacttaccaatat

SEQ ID NO: 311255 - DNA, 21 bp, Artificial sequence
  SiRNA target sequence
gcgaggtaacttaccaatatt

SEQ ID NO: 311256 - DNA, 21 bp, Artificial sequence
  SiRNA target sequence
cgaggtaacttaccaatattt

SEQ ID NO: 311257 - DNA, 21 bp, Artificial sequence
  SiRNA target sequence
gaggtaacttaccaatatttt

SEQ ID NO: 311258 - DNA, 21 bp, Artificial sequence
  SiRNA target sequence
aggtaacttaccaatatttta

SEQ ID NO: 311259 - DNA, 21 bp, Artificial sequence
  SiRNA target sequence
ggtaacttaccaatattttat

SEQ ID NO: 311260 - DNA, 21 bp, Artificial sequence
  SiRNA target sequence
gtaacttaccaatattttatt

SEQ ID NO: 311261 - DNA, 21 bp, Artificial sequence
  SiRNA target sequence
taacttaccaatattttattg

SEQ ID NO: 311262 - DNA, 21 bp, Artificial sequence
  SiRNA target sequence
aacttaccaatattttattgt

SEQ ID NO: 311263 - DNA, 21 bp, Artificial sequence
  SiRNA target sequence
acttaccaatattttattgtt

SEQ ID NO: 311264 - DNA, 21 bp, Artificial sequence
  SiRNA target sequence
cttaccaatattttattgttc

SEQ ID NO: 311265 - DNA, 21 bp, Artificial sequence
  SiRNA target sequence
ttaccaatattttattgttct

SEQ ID NO: 311266 - DNA, 21 bp, Artificial sequence
  SiRNA target sequence
taccaatattttattgttctg

SEQ ID NO: 311267 - DNA, 21 bp, Artificial sequence
  SiRNA target sequence
accaatattttattgttctgc

SEQ ID NO: 311268 - DNA, 21 bp, Artificial sequence
  SiRNA target sequence
ccaatattttattgttctgcg

SEQ ID NO: 311269 - DNA, 21 bp, Artificial sequence
  SiRNA target sequence
caatattttattgttctgcga

SEQ ID NO: 311270 - DNA, 21 bp, Artificial sequence
  SiRNA target sequence
aatattttattgttctgcgag

SEQ ID NO: 311271 - DNA, 21 bp, Artificial sequence
  SiRNA target sequence
atattttattgttctgcgagg

SEQ ID NO: 311272 - DNA, 21 bp, Artificial sequence
  SiRNA target sequence
tattttattgttctgcgagga

SEQ ID NO: 311273 - DNA, 21 bp, Artificial sequence
  SiRNA target sequence
attttattgttctgcgaggat

SEQ ID NO: 311274 - DNA, 21 bp, Artificial sequence
  SiRNA target sequence
ttttattgttctgcgaggata

SEQ ID NO: 311275 - DNA, 21 bp, Artificial sequence
  SiRNA target sequence
tttattgttctgcgaggatat

SEQ ID NO: 311276 - DNA, 21 bp, Artificial sequence
  SiRNA target sequence
ttattgttctgcgaggatatg

SEQ ID NO: 311277 - DNA, 21 bp, Artificial sequence
  SiRNA target sequence
tattgttctgcgaggatatga

SEQ ID NO: 311278 - DNA, 21 bp, Artificial sequence
  SiRNA target sequence
attgttctgcgaggatatgat

SEQ ID NO: 311279 - DNA, 21 bp, Artificial sequence
  SiRNA target sequence
ttgttctgcgaggatatgatc

SEQ ID NO: 311280 - DNA, 21 bp, Artificial sequence
  SiRNA target sequence
tgttctgcgaggatatgatct

SEQ ID NO: 311281 - DNA, 21 bp, Artificial sequence
  SiRNA target sequence
gttctgcgaggatatgatctg

SEQ ID NO: 311282 - DNA, 21 bp, Artificial sequence
  SiRNA target sequence
ttctgcgaggatatgatctga

SEQ ID NO: 311283 - DNA, 21 bp, Artificial sequence
  SiRNA target sequence
tctgcgaggatatgatctgag

SEQ ID NO: 311284 - DNA, 21 bp, Artificial sequence
  SiRNA target sequence
ctgcgaggatatgatctgagg

SEQ ID NO: 311285 - DNA, 21 bp, Artificial sequence
  SiRNA target sequence
tgcgaggatatgatctgagga

SEQ ID NO: 311286 - DNA, 21 bp, Artificial sequence
  SiRNA target sequence
gcgaggatatgatctgaggat

SEQ ID NO: 311287 - DNA, 21 bp, Artificial sequence
  SiRNA target sequence
cgaggatatgatctgaggatg

SEQ ID NO: 311288 - DNA, 21 bp, Artificial sequence
  SiRNA target sequence
gaggatatgatctgaggatga

SEQ ID NO: 311289 - DNA, 21 bp, Artificial sequence
  SiRNA target sequence
aggatatgatctgaggatgat

SEQ ID NO: 311290 - DNA, 21 bp, Artificial sequence
  SiRNA target sequence
ggatatgatctgaggatgata

SEQ ID NO: 311291 - DNA, 21 bp, Artificial sequence
  SiRNA target sequence
gatatgatctgaggatgataa

SEQ ID NO: 311292 - DNA, 21 bp, Artificial sequence
  SiRNA target sequence
atatgatctgaggatgataat

SEQ ID NO: 311293 - DNA, 21 bp, Artificial sequence
  SiRNA target sequence
tatgatctgaggatgataata

SEQ ID NO: 311294 - DNA, 21 bp, Artificial sequence
  SiRNA target sequence
atgatctgaggatgataatag

SEQ ID NO: 311295 - DNA, 21 bp, Artificial sequence
  SiRNA target sequence
tgatctgaggatgataatagt

SEQ ID NO: 311296 - DNA, 21 bp, Artificial sequence
  SiRNA target sequence
gatctgaggatgataatagtg

SEQ ID NO: 311297 - DNA, 21 bp, Artificial sequence
  SiRNA target sequence
atctgaggatgataatagtgg

SEQ ID NO: 311298 - DNA, 21 bp, Artificial sequence
  SiRNA target sequence
tctgaggatgataatagtggt

SEQ ID NO: 311299 - DNA, 21 bp, Artificial sequence
  SiRNA target sequence
ctgaggatgataatagtggtg

SEQ ID NO: 311300 - DNA, 21 bp, Artificial sequence
  SiRNA target sequence
tgaggatgataatagtggtgc

SEQ ID NO: 311301 - DNA, 21 bp, Artificial sequence
  SiRNA target sequence
gaggatgataatagtggtgca

SEQ ID NO: 311302 - DNA, 21 bp, Artificial sequence
  SiRNA target sequence
aggatgataatagtggtgcat

SEQ ID NO: 311303 - DNA, 21 bp, Artificial sequence
  SiRNA target sequence
ggatgataatagtggtgcatg

SEQ ID NO: 311304 - DNA, 21 bp, Artificial sequence
  SiRNA target sequence
gatgataatagtggtgcatgg

SEQ ID NO: 311305 - DNA, 21 bp, Artificial sequence
  SiRNA target sequence
atgataatagtggtgcatggc

SEQ ID NO: 311306 - DNA, 21 bp, Artificial sequence
  SiRNA target sequence
tgataatagtggtgcatggcc

SEQ ID NO: 311307 - DNA, 21 bp, Artificial sequence
  SiRNA target sequence
gataatagtggtgcatggccg

SEQ ID NO: 311308 - DNA, 21 bp, Artificial sequence
  SiRNA target sequence
ataatagtggtgcatggccgt

SEQ ID NO: 311309 - DNA, 21 bp, Artificial sequence
  SiRNA target sequence
taatagtggtgcatggccgtt

SEQ ID NO: 311310 - DNA, 21 bp, Artificial sequence
  SiRNA target sequence
aatagtggtgcatggccgttt

SEQ ID NO: 311311 - DNA, 21 bp, Artificial sequence
  SiRNA target sequence
atagtggtgcatggccgtttt

SEQ ID NO: 311312 - DNA, 21 bp, Artificial sequence
  SiRNA target sequence
tagtggtgcatggccgttttc

SEQ ID NO: 311313 - DNA, 21 bp, Artificial sequence
  SiRNA target sequence
agtggtgcatggccgttttca

SEQ ID NO: 311314 - DNA, 21 bp, Artificial sequence
  SiRNA target sequence
gtggtgcatggccgttttcaa

SEQ ID NO: 311315 - DNA, 21 bp, Artificial sequence
  SiRNA target sequence
tggtgcatggccgttttcaat

SEQ ID NO: 311316 - DNA, 21 bp, Artificial sequence
  SiRNA target sequence
ggtgcatggccgttttcaatg

SEQ ID NO: 311317 - DNA, 21 bp, Artificial sequence
  SiRNA target sequence
gtgcatggccgttttcaatgg

SEQ ID NO: 311318 - DNA, 21 bp, Artificial sequence
  SiRNA target sequence
tgcatggccgttttcaatgga

SEQ ID NO: 311319 - DNA, 21 bp, Artificial sequence
  SiRNA target sequence
gcatggccgttttcaatggat

SEQ ID NO: 311320 - DNA, 21 bp, Artificial sequence
  SiRNA target sequence
catggccgttttcaatggatg

SEQ ID NO: 311321 - DNA, 21 bp, Artificial sequence
  SiRNA target sequence
atggccgttttcaatggatgc

SEQ ID NO: 311322 - DNA, 21 bp, Artificial sequence
  SiRNA target sequence
tggccgttttcaatggatgct

SEQ ID NO: 311323 - DNA, 21 bp, Artificial sequence
  SiRNA target sequence
ggccgttttcaatggatgctg

SEQ ID NO: 311324 - DNA, 21 bp, Artificial sequence
  SiRNA target sequence
gccgttttcaatggatgctgt

SEQ ID NO: 311325 - DNA, 21 bp, Artificial sequence
  SiRNA target sequence
ccgttttcaatggatgctgtg

SEQ ID NO: 311326 - DNA, 21 bp, Artificial sequence
  SiRNA target sequence
cgttttcaatggatgctgtga

SEQ ID NO: 311327 - DNA, 21 bp, Artificial sequence
  SiRNA target sequence
ttgccgacgatgtgatatgag

SEQ ID NO: 311328 - DNA, 21 bp, Artificial sequence
  SiRNA target sequence
tgccgacgatgtgatatgaga

SEQ ID NO: 311329 - DNA, 21 bp, Artificial sequence
  SiRNA target sequence
gccgacgatgtgatatgagat

SEQ ID NO: 311330 - DNA, 21 bp, Artificial sequence
  SiRNA target sequence
ccgacgatgtgatatgagatg

SEQ ID NO: 311331 - DNA, 21 bp, Artificial sequence
  SiRNA target sequence
cgacgatgtgatatgagatgt

SEQ ID NO: 311332 - DNA, 21 bp, Artificial sequence
  SiRNA target sequence
gacgatgtgatatgagatgtt

SEQ ID NO: 311333 - DNA, 21 bp, Artificial sequence
  SiRNA target sequence
acgatgtgatatgagatgttg

SEQ ID NO: 311334 - DNA, 21 bp, Artificial sequence
  SiRNA target sequence
cgatgtgatatgagatgttgt

SEQ ID NO: 311335 - DNA, 21 bp, Artificial sequence
  SiRNA target sequence
gatgtgatatgagatgttgta

SEQ ID NO: 311336 - DNA, 21 bp, Artificial sequence
  SiRNA target sequence
atgtgatatgagatgttgtat

SEQ ID NO: 311337 - DNA, 21 bp, Artificial sequence
  SiRNA target sequence
tgtgatatgagatgttgtatt

SEQ ID NO: 311338 - DNA, 21 bp, Artificial sequence
  SiRNA target sequence
gtgatatgagatgttgtatta

SEQ ID NO: 311339 - DNA, 21 bp, Artificial sequence
  SiRNA target sequence
tgatatgagatgttgtattac

SEQ ID NO: 311340 - DNA, 21 bp, Artificial sequence
  SiRNA target sequence
gatatgagatgttgtattaca

SEQ ID NO: 311341 - DNA, 21 bp, Artificial sequence
  SiRNA target sequence
atatgagatgttgtattacat

SEQ ID NO: 311342 - DNA, 21 bp, Artificial sequence
  SiRNA target sequence
tatgagatgttgtattacatt

SEQ ID NO: 311343 - DNA, 21 bp, Artificial sequence
  SiRNA target sequence
atgagatgttgtattacatta

SEQ ID NO: 311344 - DNA, 21 bp, Artificial sequence
  SiRNA target sequence
tgagatgttgtattacattat

SEQ ID NO: 311345 - DNA, 21 bp, Artificial sequence
  SiRNA target sequence
gagatgttgtattacattata

SEQ ID NO: 311346 - DNA, 21 bp, Artificial sequence
  SiRNA target sequence
agatgttgtattacattatag

SEQ ID NO: 311347 - DNA, 21 bp, Artificial sequence
  SiRNA target sequence
gatgttgtattacattataga

SEQ ID NO: 311348 - DNA, 21 bp, Artificial sequence
  SiRNA target sequence
atgttgtattacattatagaa

SEQ ID NO: 311349 - DNA, 21 bp, Artificial sequence
  SiRNA target sequence
tgttgtattacattatagaaa

SEQ ID NO: 311350 - DNA, 21 bp, Artificial sequence
  SiRNA target sequence
gttgtattacattatagaaat

SEQ ID NO: 311351 - DNA, 21 bp, Artificial sequence
  SiRNA target sequence
ttgtattacattatagaaatt

SEQ ID NO: 311352 - DNA, 21 bp, Artificial sequence
  SiRNA target sequence
tgtattacattatagaaatta

SEQ ID NO: 311353 - DNA, 21 bp, Artificial sequence
  SiRNA target sequence
gtattacattatagaaattag

SEQ ID NO: 311354 - DNA, 21 bp, Artificial sequence
  SiRNA target sequence
tattacattatagaaattaga

SEQ ID NO: 311355 - DNA, 21 bp, Artificial sequence
  SiRNA target sequence
attacattatagaaattagag

SEQ ID NO: 311356 - DNA, 21 bp, Artificial sequence
  SiRNA target sequence
ttacattatagaaattagagt

SEQ ID NO: 311357 - DNA, 21 bp, Artificial sequence
  SiRNA target sequence
tacattatagaaattagagtt

SEQ ID NO: 311358 - DNA, 21 bp, Artificial sequence
  SiRNA target sequence
acattatagaaattagagttt

SEQ ID NO: 311359 - DNA, 21 bp, Artificial sequence
  SiRNA target sequence
cattatagaaattagagtttt

SEQ ID NO: 311360 - DNA, 21 bp, Artificial sequence
  SiRNA target sequence
attatagaaattagagttttt

SEQ ID NO: 311361 - DNA, 21 bp, Artificial sequence
  SiRNA target sequence
ttatagaaattagagtttttt

SEQ ID NO: 311362 - DNA, 21 bp, Artificial sequence
  SiRNA target sequence
tatagaaattagagttttttg

SEQ ID NO: 311363 - DNA, 21 bp, Artificial sequence
  SiRNA target sequence
atagaaattagagttttttgg

SEQ ID NO: 311364 - DNA, 21 bp, Artificial sequence
  SiRNA target sequence
tagaaattagagttttttggc

SEQ ID NO: 311365 - DNA, 21 bp, Artificial sequence
  SiRNA target sequence
agaaattagagttttttggct

SEQ ID NO: 311366 - DNA, 21 bp, Artificial sequence
  SiRNA target sequence
gaaattagagttttttggctc

SEQ ID NO: 311367 - DNA, 21 bp, Artificial sequence
  SiRNA target sequence
aaattagagttttttggctct

SEQ ID NO: 311368 - DNA, 21 bp, Artificial sequence
  SiRNA target sequence
aattagagttttttggctctg

SEQ ID NO: 311369 - DNA, 21 bp, Artificial sequence
  SiRNA target sequence
attagagttttttggctctgg

SEQ ID NO: 311370 - DNA, 21 bp, Artificial sequence
  SiRNA target sequence
ttagagttttttggctctggg

SEQ ID NO: 311371 - DNA, 21 bp, Artificial sequence
  SiRNA target sequence
tagagttttttggctctgggg

SEQ ID NO: 311372 - DNA, 21 bp, Artificial sequence
  SiRNA target sequence
agagttttttggctctgggga

SEQ ID NO: 311373 - DNA, 21 bp, Artificial sequence
  SiRNA target sequence
gagttttttggctctggggat

SEQ ID NO: 311374 - DNA, 21 bp, Artificial sequence
  SiRNA target sequence
agttttttggctctggggata

SEQ ID NO: 311375 - DNA, 21 bp, Artificial sequence
  SiRNA target sequence
gttttttggctctggggatag

SEQ ID NO: 311376 - DNA, 21 bp, Artificial sequence
  SiRNA target sequence
ttttttggctctggggatagt

SEQ ID NO: 311377 - DNA, 21 bp, Artificial sequence
  SiRNA target sequence
tttttggctctggggatagta

SEQ ID NO: 311378 - DNA, 21 bp, Artificial sequence
  SiRNA target sequence
ttttggctctggggatagtat

SEQ ID NO: 311379 - DNA, 21 bp, Artificial sequence
  SiRNA target sequence
tttggctctggggatagtatg

SEQ ID NO: 311380 - DNA, 21 bp, Artificial sequence
  SiRNA target sequence
ttggctctggggatagtatga

SEQ ID NO: 311381 - DNA, 21 bp, Artificial sequence
  SiRNA target sequence
tggctctggggatagtatgat

SEQ ID NO: 311382 - DNA, 21 bp, Artificial sequence
  SiRNA target sequence
ggctctggggatagtatgatc

SEQ ID NO: 311383 - DNA, 21 bp, Artificial sequence
  SiRNA target sequence
gctctggggatagtatgatcg

SEQ ID NO: 311384 - DNA, 21 bp, Artificial sequence
  SiRNA target sequence
ctctggggatagtatgatcgc

SEQ ID NO: 311385 - DNA, 21 bp, Artificial sequence
  SiRNA target sequence
tctggggatagtatgatcgca

SEQ ID NO: 311386 - DNA, 21 bp, Artificial sequence
  SiRNA target sequence
ctggggatagtatgatcgcaa

SEQ ID NO: 311387 - DNA, 21 bp, Artificial sequence
  SiRNA target sequence
tggggatagtatgatcgcaag

SEQ ID NO: 311388 - DNA, 21 bp, Artificial sequence
  SiRNA target sequence
ggggatagtatgatcgcaaga

SEQ ID NO: 311389 - DNA, 21 bp, Artificial sequence
  SiRNA target sequence
gggatagtatgatcgcaagat

SEQ ID NO: 311390 - DNA, 21 bp, Artificial sequence
  SiRNA target sequence
ggatagtatgatcgcaagatt

SEQ ID NO: 311391 - DNA, 21 bp, Artificial sequence
  SiRNA target sequence
gatagtatgatcgcaagattg

SEQ ID NO: 311392 - DNA, 21 bp, Artificial sequence
  SiRNA target sequence
atagtatgatcgcaagattga

SEQ ID NO: 311393 - DNA, 21 bp, Artificial sequence
  SiRNA target sequence
tagtatgatcgcaagattgaa

SEQ ID NO: 311394 - DNA, 21 bp, Artificial sequence
  SiRNA target sequence
agtatgatcgcaagattgaaa

SEQ ID NO: 311395 - DNA, 21 bp, Artificial sequence
  SiRNA target sequence
gtatgatcgcaagattgaaaa

SEQ ID NO: 311396 - DNA, 21 bp, Artificial sequence
  SiRNA target sequence
tatgatcgcaagattgaaaat

SEQ ID NO: 311397 - DNA, 21 bp, Artificial sequence
  SiRNA target sequence
atgatcgcaagattgaaaatt

SEQ ID NO: 311398 - DNA, 21 bp, Artificial sequence
  SiRNA target sequence
tgatcgcaagattgaaaatta

SEQ ID NO: 311399 - DNA, 21 bp, Artificial sequence
  SiRNA target sequence
gatcgcaagattgaaaattaa

SEQ ID NO: 311400 - DNA, 21 bp, Artificial sequence
  SiRNA target sequence
atcgcaagattgaaaattaaa

SEQ ID NO: 311401 - DNA, 21 bp, Artificial sequence
  SiRNA target sequence
tcgcaagattgaaaattaaag

SEQ ID NO: 311402 - DNA, 21 bp, Artificial sequence
  SiRNA target sequence
cgcaagattgaaaattaaaga

SEQ ID NO: 311403 - DNA, 21 bp, Artificial sequence
  SiRNA target sequence
gcaagattgaaaattaaagaa

SEQ ID NO: 311404 - DNA, 21 bp, Artificial sequence
  SiRNA target sequence
caagattgaaaattaaagaaa

SEQ ID NO: 311405 - DNA, 21 bp, Artificial sequence
  SiRNA target sequence
aagattgaaaattaaagaaat

SEQ ID NO: 311406 - DNA, 21 bp, Artificial sequence
  SiRNA target sequence
agattgaaaattaaagaaatt

SEQ ID NO: 311407 - DNA, 21 bp, Artificial sequence
  SiRNA target sequence
gattgaaaattaaagaaattg

SEQ ID NO: 311408 - DNA, 21 bp, Artificial sequence
  SiRNA target sequence
attgaaaattaaagaaattga

SEQ ID NO: 311409 - DNA, 21 bp, Artificial sequence
  SiRNA target sequence
ttgaaaattaaagaaattgac

SEQ ID NO: 311410 - DNA, 21 bp, Artificial sequence
  SiRNA target sequence
tgaaaattaaagaaattgacg

SEQ ID NO: 311411 - DNA, 21 bp, Artificial sequence
  SiRNA target sequence
gaaaattaaagaaattgacgg

SEQ ID NO: 311412 - DNA, 21 bp, Artificial sequence
  SiRNA target sequence
aaaattaaagaaattgacgga

SEQ ID NO: 311413 - DNA, 21 bp, Artificial sequence
  SiRNA target sequence
aaattaaagaaattgacggaa

SEQ ID NO: 311414 - DNA, 21 bp, Artificial sequence
  SiRNA target sequence
aattaaagaaattgacggaag

SEQ ID NO: 311415 - DNA, 21 bp, Artificial sequence
  SiRNA target sequence
attaaagaaattgacggaaga

SEQ ID NO: 311416 - DNA, 21 bp, Artificial sequence
  SiRNA target sequence
ttaaagaaattgacggaagaa

SEQ ID NO: 311417 - DNA, 21 bp, Artificial sequence
  SiRNA target sequence
taaagaaattgacggaagaat

SEQ ID NO: 311418 - DNA, 21 bp, Artificial sequence
  SiRNA target sequence
aaagaaattgacggaagaata

SEQ ID NO: 311419 - DNA, 21 bp, Artificial sequence
  SiRNA target sequence
aagaaattgacggaagaatac

SEQ ID NO: 311420 - DNA, 21 bp, Artificial sequence
  SiRNA target sequence
agaaattgacggaagaatacc

SEQ ID NO: 311421 - DNA, 21 bp, Artificial sequence
  SiRNA target sequence
gaaattgacggaagaatacca

SEQ ID NO: 311422 - DNA, 21 bp, Artificial sequence
  SiRNA target sequence
aaattgacggaagaataccac

SEQ ID NO: 311423 - DNA, 21 bp, Artificial sequence
  SiRNA target sequence
aattgacggaagaataccaca

SEQ ID NO: 311424 - DNA, 21 bp, Artificial sequence
  SiRNA target sequence
attgacggaagaataccacaa

SEQ ID NO: 311425 - DNA, 21 bp, Artificial sequence
  SiRNA target sequence
ttgacggaagaataccacaag

SEQ ID NO: 311426 - DNA, 21 bp, Artificial sequence
  SiRNA target sequence
tgacggaagaataccacaagg

SEQ ID NO: 311427 - DNA, 21 bp, Artificial sequence
  SiRNA target sequence
gacggaagaataccacaagga

SEQ ID NO: 311428 - DNA, 21 bp, Artificial sequence
  SiRNA target sequence
acggaagaataccacaaggag

SEQ ID NO: 311429 - DNA, 21 bp, Artificial sequence
  SiRNA target sequence
cggaagaataccacaaggagt

SEQ ID NO: 311430 - DNA, 21 bp, Artificial sequence
  SiRNA target sequence
ggaagaataccacaaggagtg

SEQ ID NO: 311431 - DNA, 21 bp, Artificial sequence
  SiRNA target sequence
gaagaataccacaaggagtgg

SEQ ID NO: 311432 - DNA, 21 bp, Artificial sequence
  SiRNA target sequence
aagaataccacaaggagtgga

SEQ ID NO: 311433 - DNA, 21 bp, Artificial sequence
  SiRNA target sequence
agaataccacaaggagtggat

SEQ ID NO: 311434 - DNA, 21 bp, Artificial sequence
  SiRNA target sequence
gaataccacaaggagtggatt

SEQ ID NO: 311435 - DNA, 21 bp, Artificial sequence
  SiRNA target sequence
aataccacaaggagtggattg

SEQ ID NO: 311436 - DNA, 21 bp, Artificial sequence
  SiRNA target sequence
ataccacaaggagtggattgt

SEQ ID NO: 311437 - DNA, 21 bp, Artificial sequence
  SiRNA target sequence
taccacaaggagtggattgtg

SEQ ID NO: 311438 - DNA, 21 bp, Artificial sequence
  SiRNA target sequence
accacaaggagtggattgtgc

SEQ ID NO: 311439 - DNA, 21 bp, Artificial sequence
  SiRNA target sequence
ccacaaggagtggattgtgcg

SEQ ID NO: 311440 - DNA, 21 bp, Artificial sequence
  SiRNA target sequence
cacaaggagtggattgtgcgg

SEQ ID NO: 311441 - DNA, 21 bp, Artificial sequence
  SiRNA target sequence
acaaggagtggattgtgcggc

SEQ ID NO: 311442 - DNA, 21 bp, Artificial sequence
  SiRNA target sequence
caaggagtggattgtgcggct

SEQ ID NO: 311443 - DNA, 21 bp, Artificial sequence
  SiRNA target sequence
aaggagtggattgtgcggctt

SEQ ID NO: 311444 - DNA, 21 bp, Artificial sequence
  SiRNA target sequence
aggagtggattgtgcggctta

SEQ ID NO: 311445 - DNA, 21 bp, Artificial sequence
  SiRNA target sequence
ggagtggattgtgcggcttaa

SEQ ID NO: 311446 - DNA, 21 bp, Artificial sequence
  SiRNA target sequence
gagtggattgtgcggcttaat

SEQ ID NO: 311447 - DNA, 21 bp, Artificial sequence
  SiRNA target sequence
agtggattgtgcggcttaatt

SEQ ID NO: 311448 - DNA, 21 bp, Artificial sequence
  SiRNA target sequence
gtggattgtgcggcttaattt

SEQ ID NO: 311449 - DNA, 21 bp, Artificial sequence
  SiRNA target sequence
tggattgtgcggcttaatttg

SEQ ID NO: 311450 - DNA, 21 bp, Artificial sequence
  SiRNA target sequence
ggattgtgcggcttaatttga

SEQ ID NO: 311451 - DNA, 21 bp, Artificial sequence
  SiRNA target sequence
gattgtgcggcttaatttgac

SEQ ID NO: 311452 - DNA, 21 bp, Artificial sequence
  SiRNA target sequence
attgtgcggcttaatttgact

SEQ ID NO: 311453 - DNA, 21 bp, Artificial sequence
  SiRNA target sequence
ttgtgcggcttaatttgactc

SEQ ID NO: 311454 - DNA, 21 bp, Artificial sequence
  SiRNA target sequence
tgtgcggcttaatttgactca

SEQ ID NO: 311455 - DNA, 21 bp, Artificial sequence
  SiRNA target sequence
gtgcggcttaatttgactcaa

SEQ ID NO: 311456 - DNA, 21 bp, Artificial sequence
  SiRNA target sequence
tgcggcttaatttgactcaac

SEQ ID NO: 311457 - DNA, 21 bp, Artificial sequence
  SiRNA target sequence
gcggcttaatttgactcaacg

SEQ ID NO: 311458 - DNA, 21 bp, Artificial sequence
  SiRNA target sequence
cggcttaatttgactcaacgc

SEQ ID NO: 311459 - DNA, 21 bp, Artificial sequence
  SiRNA target sequence
ggcttaatttgactcaacgcg

SEQ ID NO: 311460 - DNA, 21 bp, Artificial sequence
  SiRNA target sequence
gcttaatttgactcaacgcga

SEQ ID NO: 311461 - DNA, 21 bp, Artificial sequence
  SiRNA target sequence
cttaatttgactcaacgcgag

SEQ ID NO: 311462 - DNA, 21 bp, Artificial sequence
  SiRNA target sequence
ttaatttgactcaacgcgagg

SEQ ID NO: 311463 - DNA, 21 bp, Artificial sequence
  SiRNA target sequence
taatttgactcaacgcgaggt

SEQ ID NO: 311464 - DNA, 21 bp, Artificial sequence
  SiRNA target sequence
aatttgactcaacgcgaggta

SEQ ID NO: 311465 - DNA, 21 bp, Artificial sequence
  SiRNA target sequence
atttgactcaacgcgaggtaa

SEQ ID NO: 311466 - DNA, 21 bp, Artificial sequence
  SiRNA target sequence
tttgactcaacgcgaggtaac

SEQ ID NO: 311467 - DNA, 21 bp, Artificial sequence
  SiRNA target sequence
ttgactcaacgcgaggtaact

SEQ ID NO: 311468 - DNA, 21 bp, Artificial sequence
  SiRNA target sequence
tgactcaacgcgaggtaactt

SEQ ID NO: 311469 - DNA, 21 bp, Artificial sequence
  SiRNA target sequence
gactcaacgcgaggtaactta

SEQ ID NO: 311470 - DNA, 21 bp, Artificial sequence
  SiRNA target sequence
actcaacgcgaggtaacttac

SEQ ID NO: 311471 - DNA, 21 bp, Artificial sequence
  SiRNA target sequence
ctcaacgcgaggtaacttacc

SEQ ID NO: 311472 - DNA, 21 bp, Artificial sequence
  SiRNA target sequence
tcaacgcgaggtaacttacca

SEQ ID NO: 311473 - DNA, 21 bp, Artificial sequence
  SiRNA target sequence
caacgcgaggtaacttaccaa

SEQ ID NO: 311474 - DNA, 21 bp, Artificial sequence
  SiRNA target sequence
aacgcgaggtaacttaccaat

SEQ ID NO: 311475 - DNA, 21 bp, Artificial sequence
  SiRNA target sequence
acgcgaggtaacttaccaata

SEQ ID NO: 311476 - DNA, 21 bp, Artificial sequence
  SiRNA target sequence
cgcgaggtaacttaccaatat

SEQ ID NO: 311477 - DNA, 21 bp, Artificial sequence
  SiRNA target sequence
gcgaggtaacttaccaatatt

SEQ ID NO: 311478 - DNA, 21 bp, Artificial sequence
  SiRNA target sequence
cgaggtaacttaccaatattt

SEQ ID NO: 311479 - DNA, 21 bp, Artificial sequence
  SiRNA target sequence
gaggtaacttaccaatatttt

SEQ ID NO: 311480 - DNA, 21 bp, Artificial sequence
  SiRNA target sequence
aggtaacttaccaatatttta

SEQ ID NO: 311481 - DNA, 21 bp, Artificial sequence
  SiRNA target sequence
ggtaacttaccaatattttat

SEQ ID NO: 311482 - DNA, 21 bp, Artificial sequence
  SiRNA target sequence
gtaacttaccaatattttatt

SEQ ID NO: 311483 - DNA, 21 bp, Artificial sequence
  SiRNA target sequence
taacttaccaatattttattg

SEQ ID NO: 311484 - DNA, 21 bp, Artificial sequence
  SiRNA target sequence
aacttaccaatattttattgt

SEQ ID NO: 311485 - DNA, 21 bp, Artificial sequence
  SiRNA target sequence
acttaccaatattttattgtt

SEQ ID NO: 311486 - DNA, 21 bp, Artificial sequence
  SiRNA target sequence
cttaccaatattttattgttc

SEQ ID NO: 311487 - DNA, 21 bp, Artificial sequence
  SiRNA target sequence
ttaccaatattttattgttct

SEQ ID NO: 311488 - DNA, 21 bp, Artificial sequence
  SiRNA target sequence
taccaatattttattgttctg

SEQ ID NO: 311489 - DNA, 21 bp, Artificial sequence
  SiRNA target sequence
accaatattttattgttctgc

SEQ ID NO: 311490 - DNA, 21 bp, Artificial sequence
  SiRNA target sequence
ccaatattttattgttctgcg

SEQ ID NO: 311491 - DNA, 21 bp, Artificial sequence
  SiRNA target sequence
caatattttattgttctgcga

SEQ ID NO: 311492 - DNA, 21 bp, Artificial sequence
  SiRNA target sequence
aatattttattgttctgcgag

SEQ ID NO: 311493 - DNA, 21 bp, Artificial sequence
  SiRNA target sequence
atattttattgttctgcgagg

SEQ ID NO: 311494 - DNA, 21 bp, Artificial sequence
  SiRNA target sequence
tattttattgttctgcgagga

SEQ ID NO: 311495 - DNA, 21 bp, Artificial sequence
  SiRNA target sequence
attttattgttctgcgaggat

SEQ ID NO: 311496 - DNA, 21 bp, Artificial sequence
  SiRNA target sequence
ttttattgttctgcgaggata

SEQ ID NO: 311497 - DNA, 21 bp, Artificial sequence
  SiRNA target sequence
tttattgttctgcgaggatat

SEQ ID NO: 311498 - DNA, 21 bp, Artificial sequence
  SiRNA target sequence
ttattgttctgcgaggatatg

SEQ ID NO: 311499 - DNA, 21 bp, Artificial sequence
  SiRNA target sequence
tattgttctgcgaggatatga

SEQ ID NO: 311500 - DNA, 21 bp, Artificial sequence
  SiRNA target sequence
attgttctgcgaggatatgat

SEQ ID NO: 311501 - DNA, 21 bp, Artificial sequence
  SiRNA target sequence
ttgttctgcgaggatatgatc

SEQ ID NO: 311502 - DNA, 21 bp, Artificial sequence
  SiRNA target sequence
tgttctgcgaggatatgatct

SEQ ID NO: 311503 - DNA, 21 bp, Artificial sequence
  SiRNA target sequence
gttctgcgaggatatgatctg

SEQ ID NO: 311504 - DNA, 21 bp, Artificial sequence
  SiRNA target sequence
ttctgcgaggatatgatctga

SEQ ID NO: 311505 - DNA, 21 bp, Artificial sequence
  SiRNA target sequence
tctgcgaggatatgatctgag

SEQ ID NO: 311506 - DNA, 21 bp, Artificial sequence
  SiRNA target sequence
ctgcgaggatatgatctgagg

SEQ ID NO: 311507 - DNA, 21 bp, Artificial sequence
  SiRNA target sequence
tgcgaggatatgatctgagga

SEQ ID NO: 311508 - DNA, 21 bp, Artificial sequence
  SiRNA target sequence
gcgaggatatgatctgaggat

SEQ ID NO: 311509 - DNA, 21 bp, Artificial sequence
  SiRNA target sequence
cgaggatatgatctgaggatg

SEQ ID NO: 311510 - DNA, 21 bp, Artificial sequence
  SiRNA target sequence
gaggatatgatctgaggatga

SEQ ID NO: 311511 - DNA, 21 bp, Artificial sequence
  SiRNA target sequence
aggatatgatctgaggatgat

SEQ ID NO: 311512 - DNA, 21 bp, Artificial sequence
  SiRNA target sequence
ggatatgatctgaggatgata

SEQ ID NO: 311513 - DNA, 21 bp, Artificial sequence
  SiRNA target sequence
gatatgatctgaggatgataa

SEQ ID NO: 311514 - DNA, 21 bp, Artificial sequence
  SiRNA target sequence
atatgatctgaggatgataat

SEQ ID NO: 311515 - DNA, 21 bp, Artificial sequence
  SiRNA target sequence
tatgatctgaggatgataata

SEQ ID NO: 311516 - DNA, 21 bp, Artificial sequence
  SiRNA target sequence
atgatctgaggatgataatag

SEQ ID NO: 311517 - DNA, 21 bp, Artificial sequence
  SiRNA target sequence
tgatctgaggatgataatagt

SEQ ID NO: 311518 - DNA, 21 bp, Artificial sequence
  SiRNA target sequence
gatctgaggatgataatagtg

SEQ ID NO: 311519 - DNA, 21 bp, Artificial sequence
  SiRNA target sequence
atctgaggatgataatagtgg

SEQ ID NO: 311520 - DNA, 21 bp, Artificial sequence
  SiRNA target sequence
tctgaggatgataatagtggt

SEQ ID NO: 311521 - DNA, 21 bp, Artificial sequence
  SiRNA target sequence
ctgaggatgataatagtggtg

SEQ ID NO: 311522 - DNA, 21 bp, Artificial sequence
  SiRNA target sequence
tgaggatgataatagtggtgc

SEQ ID NO: 311523 - DNA, 21 bp, Artificial sequence
  SiRNA target sequence
gaggatgataatagtggtgca

SEQ ID NO: 311524 - DNA, 21 bp, Artificial sequence
  SiRNA target sequence
aggatgataatagtggtgcat

SEQ ID NO: 311525 - DNA, 21 bp, Artificial sequence
  SiRNA target sequence
ggatgataatagtggtgcatg

SEQ ID NO: 311526 - DNA, 21 bp, Artificial sequence
  SiRNA target sequence
gatgataatagtggtgcatgg

SEQ ID NO: 311527 - DNA, 21 bp, Artificial sequence
  SiRNA target sequence
atgataatagtggtgcatggc

SEQ ID NO: 311528 - DNA, 21 bp, Artificial sequence
  SiRNA target sequence
tgataatagtggtgcatggcc

SEQ ID NO: 311529 - DNA, 21 bp, Artificial sequence
  SiRNA target sequence
gataatagtggtgcatggccg

SEQ ID NO: 311530 - DNA, 21 bp, Artificial sequence
  SiRNA target sequence
ataatagtggtgcatggccgt

SEQ ID NO: 311531 - DNA, 21 bp, Artificial sequence
  SiRNA target sequence
taatagtggtgcatggccgtt

SEQ ID NO: 311532 - DNA, 21 bp, Artificial sequence
  SiRNA target sequence
aatagtggtgcatggccgttt

SEQ ID NO: 311533 - DNA, 21 bp, Artificial sequence
  SiRNA target sequence
atagtggtgcatggccgtttt

SEQ ID NO: 311534 - DNA, 21 bp, Artificial sequence
  SiRNA target sequence
tagtggtgcatggccgttttc

SEQ ID NO: 311535 - DNA, 21 bp, Artificial sequence
  SiRNA target sequence
agtggtgcatggccgttttca

SEQ ID NO: 311536 - DNA, 21 bp, Artificial sequence
  SiRNA target sequence
gtggtgcatggccgttttcaa

SEQ ID NO: 311537 - DNA, 21 bp, Artificial sequence
  SiRNA target sequence
tggtgcatggccgttttcaat

SEQ ID NO: 311538 - DNA, 21 bp, Artificial sequence
  SiRNA target sequence
ggtgcatggccgttttcaatg

SEQ ID NO: 311539 - DNA, 21 bp, Artificial sequence
  SiRNA target sequence
gtgcatggccgttttcaatgg

SEQ ID NO: 311540 - DNA, 21 bp, Artificial sequence
  SiRNA target sequence
tgcatggccgttttcaatgga

SEQ ID NO: 311541 - DNA, 21 bp, Artificial sequence
  SiRNA target sequence
gcatggccgttttcaatggat

SEQ ID NO: 311542 - DNA, 21 bp, Artificial sequence
  SiRNA target sequence
catggccgttttcaatggatg

SEQ ID NO: 311543 - DNA, 21 bp, Artificial sequence
  SiRNA target sequence
atggccgttttcaatggatgc

SEQ ID NO: 311544 - DNA, 21 bp, Artificial sequence
  SiRNA target sequence
tggccgttttcaatggatgct

SEQ ID NO: 311545 - DNA, 21 bp, Artificial sequence
  SiRNA target sequence
ggccgttttcaatggatgctg

SEQ ID NO: 311546 - DNA, 21 bp, Artificial sequence
  SiRNA target sequence
gccgttttcaatggatgctgt

SEQ ID NO: 311547 - DNA, 21 bp, Artificial sequence
  SiRNA target sequence
ccgttttcaatggatgctgtg

SEQ ID NO: 311548 - DNA, 21 bp, Artificial sequence
  SiRNA target sequence
cgttttcaatggatgctgtga

SEQ ID NO: 311549 - DNA, 6648 bp, Varroa jacobsoni
atgccaccggcgcccgccgagactgctttgtcagctaacacggaacagcctgctttcagtaccagcagcgccacgccgcacgcccttgcactgcccatcgcagaagatggcgtccacgcagaccatgacgacgatgatttccacgaccacgacatcgagcacatgttgggcgatgaaccgcaatcgatatttcggccgtttacgagggagagcctcgcgacccagctcgcgcgcctggccgaggaggcggccaagaaggcgcagctggagaagatgcgcgaggagggaatcgagcctgaaccgcaattctaccatcacaaagaagccccagaccctgatccgggtttggaggccggcggtcccttgcccaagcggatcgttaatgacttccctcctgagctgatcgccacacctgtagaggaaatagataagtactacgagaacaagaggacgttcatggtgatcagcaagggcaaagacatctttcgcttcagctcgactaatgccctctggatattgagcccgttcaacccaattcgtcgtctggccatctgcatcctggtgcacccattgtttagctttttcatcattgtcgccattttggtcaactgtgtactcatgaccatgccggcgaacggcaaaatcgaacagaccgaaacaatattcacgacgatttacacattcgaatcgttcatcaaaatcctcgcccgtggtttcattttggaacggtttacatatcttggggatccatggaattggctagatttcattgtaataacgttagcctatgtgacaatgtttgtcaatttgggtaaccttagtgccctgagaacattccgtgtgcttcgagctttaaagaccgtcgctatcgtacctggtctcaagaccattgtaggcgctgttatcgagtctgtgaagaatctacgggatgtaataattttgactatgttttcattgtcggtatttgccctcatgggactacaaatctatatgggggtgttgacccaaaaatgtgtgcaacagcccccagctgggctatctccaccagagtggtacgattttgtccacaatgaaacgcattggttcaaagattccaatggagacttccccctctgcgggaacggtacaggagcaaaacaatgttccgctgactacatctgcatgcaagggataggagaaaaccccaattatggcttcaccaacttcgacaccttcggctgggcctttctatcggctttccgcctaatgacccaagactactgggagtctctctaccagatgatacttcggtctgcggggccgtggcacatgtgtttctttgtcgtcattatctttctcggatcattctatctcgtcaatctgattctcgccattgtcgcaatgtcatatgacgacttgcagaagcgcgccgaagaagaagccgaagaggatcgcctattggaagaggctatgcgattggaggaagaagctcgtgaagaagctcgagcggaggccgctaaccgtgtagcggaggctaaacgggaggcgcgtgaagttcggaaggacgagcgtgatgcggcgctggccagagagatgcaagcagctacagctgctgctggtggaggtgctggcaaaaagggtgttaatcaggtacccaaccaggcgaatcacggaggacagctggccaagagtccttcggaatattcgatgcgttcgctggacgccggcaccgggcaccccagcgtaccgccggacgagagggccagccttcgaagcatcgacggtgctgatctactacagcacaccggacacggcggtccacattcacaacaacagcaacaactctattcacaaagtcggcataacaacggaaaggttcgcaaggcgagtttgtctctgcctggttcaccattcaatatccggcggggctcgcgttcaagtggccaatggcgacctagcggtcatccagcgaacggtggtggaggtgccgctggtcgccgtccagggggtggcggtggacagccctgctatggaggggcaaaaccattactacggcagacatacgtagacgctcaggaacacctcccgttcgccgacgactcggccgcggtcaccccaatgtcggaagacaacggggccatcattattcctctctactccaatttgcagcactctcgcagaagcagctacacatcacattcgtcgcgattgtcgtacacctcgcacggggaagtctactgcttaacgaaggagtcgcagttgagatcgagatcacgcaatctacagaattacttctatgatcaggagacgcggctggattctgaagactacattctatctaaaattaaacaggttaacaaaccatatatggagccgtcgactcggcatcctatggtcgatatgagagacgtgatggtcctcaacgatatcatcgagcaggcagctggccgccaaagcaaggccagcgagagagtctccatctattatttttccacagatgacgaagacgaaggctctctcgaggaagaagatgtcgaagccaaatggaaggaaaagtgtctcgctggctgtttgaaatgtatcgacattttctgcgtgtgggattgttgctggtgctggatacgcgcccaagagataatcggtctcattgtatttgatccctttatggaactgtttatcacgttgtgcattgtcgtcaacacgctattcatggccatggaccatcacgacatggatcgagattttgaaaacgttctccgctcaggaaactatttcttcaccgctaccttcgccattgaagcgaccatgaagcttatggcgaaaagtccaaaaaattattttaaagaagggtggaatatatttgattttatcattgttgcattgtcgttactcgagttgggtctggaaggcgtacaaggattgtctgtgttgcgttcatttcgacttttgagagtcttcaaactagccaagtcatggccaacgttgaatctactgatatctatcatgggcaagacgataggagctctgggtaacctgacctttgtgttgggaattatcatcttcattttcgccgttatgggcatgcaacttttcggcaagaactatctcgacaacaagtgtttattcccggaacagcaagtgccgcgctggaatttcttagatttcatgcactcgttgatgattgtctttcgggtgctatgcggcgagtggatcgagtcgatgtgggactgtatgtgggtctcgggctggccctgtatcccgttctttctcgccaccgtcgttattggcaacctggtcgtactcaacctctttttggccctgttgctctcttcgtttggagcttccaacctttcacaggccaatcccgattccggcgacacaaagaaattacaagaagctatagaccgttttcatcgagccggaagatggattaagaaaaaatttcgagatctattcatgctatgttcgggtaaacagcgcaaccagatctcggatcaaacctacgccgaagacctggacctcgacacaggggtcattattatggatggacaggttattaagaaggatagccccacgcccgaactcatcgatgggttggatgttggttttcaagctgataagcaacaggcgcaggtgattgtaatgcaaaagcttaaaaacaattcccgacctatcattggcgactcaaaggaatttagcaacaaagttcatccaggccccgacttttgcctggtaaagccgaacgacaacggcgaaggcctcgtgcaagacaccgagcttggggcctccacgccgctcagctcgccttcctgtatagttgaacagcctctgtctcacgacagtgtgggcctgccacctggtggacaacagcggacaactacgactactgcggcagttggaggtggagcgacacctgccatggagaacaatctcaccaccccactcacggccggaaccggcttgacgtctgttcgtttcagcggcgaacctccaaacctcgatcaacacgagaacaacccccagtttgccgacgcgacgcctgtaagcctggccgcatctaaggataagtcctccggcgacgacggggatgaagttgatggcaaactggagggcctcgcggatgacgtcggcgacggcggcgacgcaaccgtttctctgcccgcaaacgcagaaggaaaagaaaacgctggtggtagtgatgtaggggctgaagaagacaaggagcaactagaaggcggcgcccttgaaacagccgcctctgacctcatcatccctgagctgccggccgattgttgtcccgaatgctgctacgtgaagttcgcctgctgctgcattttcgatgattcccagccactttttgccaagtacaaattgtaccggtcgcaagcgttcgctctggtcgagaatgagtacttcgagaccattgtcgtcgtcctcatcttgaccagcagcctcgccttggctttggaagacgtaaatctgaaacaacgtcagtggctgatcaacatactgaatgtcatggacaaaacgttcaccgtaatcttcttctccgaaatgttactcaaatggctagcctttggtttccaaaagtatttcaccaacgcgtggtgttggctcgactttgtcatcgtactcgtatctgtgatcaatctagtagccacatggctaggagccggtaaaatccaagcgttcaagacgatgagaaccctgcgtgccttgcgtccactccgagcgctttcccgcttccaaggcatgagggtcgtggttaacgctctagtgcaagccattcctgccatcttcaatgtgttgctggtctgtttggttttctggctgatcttctctatcatgggtgtccagatgttcgctggcagattctaccactgcgtagacgccaacaactcccaattgaactcgacgtttattccgaacaaagaagcgtgcattaataacaactttacctggaaaaaccctatgataaatttcgataacgtgctcaatgcctatttggctttgttccaagtggcaacgtttaagggttggacagagatcatggctcatgccactgactccaggggcaaagacgaccaacccgactacgaagtgaacatctacatgtacctatacttcgtatttttcataattttcggggccttttttaccctgaacttatttatcggtgtaatcatcgataacttcaatgaacaaaagaagaaagctggaggatccctggaaatgtttatgaccgaagaccagaagaaatactacagcgcaatgaagaaaatgggatcaaagaaacccgcaaaggctattccacggccaagatttaaacttcaggcaatgatattcgacctgacgacgaacagaatgttcgacatggcaattatgatcttcatcgtgctcaacatgacagtgatggctatggaacactatcaacaatccgattttttcgaatcgatcctagagagactgaatatctttttcattgccgtctttacggcagaatgcgtgcttaagatcttcgcattgcgctggcactactttaaggaaccctggaacatgttcgacttcgtcgtcgttatcctttcgatccttggcacagtcctgaaggatctgatcgccgcctacttcgtgtcaccgactctgcttcgggttgtacgcgtcgttaaggttggccgagttctgcgcctagtcaaaggcgctcgtggaatccgaacactgctgtttgccctcgccatgtctctaccggcgctgttcaacatctgcctgctacttttcctcgtcatgttcatctacgccatctttggcatgtcattcttcatgaacgtgaaacatcggtatggcgtcgacgagaactttaacttcgaaacgttcggccagtccatgatcttgctgttccaaatgtgtacgtccgccggctggagtgatgtcctcgccgcgatcatggacgaaacggactgcgaggaacccaccatcgacgaggatggcgagaccgaaggaaactgtgacaagaaaggcatagctgtagcatatttggtcagctatctgatcatctcattcctggtgatcatcaacatgtacattgccgtcatcctcgaaaactactcgcaggccacagaagacgtccaggaaggtctaacggacgacgattacgatatgtactacgagatctggcagcagttcgaccccaagggcacccagtacctgccctactcccatttgtcgaactttgttaacgccctagaagagccgctgcagataccaaaacccaacaagtacaagctgatcgcgctggacatcccgatctgcaagggagacatggtgtattgtgtcgacatcctcgacgcactcacgcgggacttcttcgctcgtaagggtcatcagatcgaggagcctccggaactaacggaacaagtgattcacatcgaccggccggggtacgaacctatctcgagcaccctccttcgccagcggcaagaatattgtgctcgtgtcattcagcatgcgtggcggaggtcaaagggcgagtacgacgattcggatgaggagacaggaggtgcccaggataccgccattgtcgttgtggatggagacgacacaaagaccaaggtggttatccgtccctcgcccgctccgctcgcagacgccagtcggtctgacgcgcaagtatga

SEQ ID NO: 311550 - DNA, 1545 bp, Varroa destructor
ataagattaatacgttgattattttcttgtaatcataaggatattggaactatttattttatttttagtttatgatcaggagttttaggaataatattaagtctattaattcgtgtagagttaggtcaacctggttcttttattggagatgatcagatttataatactattgttacttctcatgcttttgtaataattttttttatagttatacctgctataattggaggttttggtaattggttagttcctttaataatttctgcaccagatatagcttttccacgtttaaataatataagtttttgattattagtaccttctcttagtttattaattttttcttcttttattgaaagtggagtaggtacaggttgaacggtttatcctcctttatcaggaaatttatttcatagaggtgtagcagttgatttaggaattttaagtttgcatttagctggaatctcctctattataagatctattaattttattgctactattttaaatatacgtgtaaaggggataaatcttgaaataatgcctttatttgtatggtctgtttttattactactattttattattattatctttgcctgttttagctggagctattacaatattgttaacagatcgaaattttaatactacattttttgatcctagaggtggtggtgatcctattttatatcaacatttattttgattttttggacacccagaagtttatattttaattttgcctggttttggtattatttctcatgtaatttgtatacaaagagggaagaagcagccttttggaaatttagggataatttacgctataataactatcggtattttaggttttattgtatgggctcatcatatatttacagtaggaatagatattgatactcgagcatattttactgcagctacaataattattgcggttcctactggtattaaaattttttcttgattagcaacaattcatggttctatagttaaattagatgtcccgataatttgatctttaggttttatttttttatttactttagggggtattactggtgtaattttagctaattcttctattgatattgttttacatgatacttattatgtagtagcacattttcactatgtattaagaataggggctgtatttgctattattgctggggttgtaaattgatttcctatattttttggaataagaatgaattctaaatttttaaaggttcattttctaataatatttattggagtaaatataactttttttcctcaacattttttaggtttaagtggaatacctcgtcgttattcagattatcctgatttttacagaaggtgaaatataatatctagtctaggttcattaatatctgtattaagaatatgtttatttttatttattttatgagaggctatagtggtaaaacgaatagtagtttattctcataatataagaactagtttggagtgaaattttaattttcctccagttgctcatacttttaatgaagtagtagtaatttatactaaatag

SEQ ID NO: 311551 - DNA, 945 bp, Varroa destructor
ataaaattgttaagaattgtattattggtaatagtttctttaatatctttttcggtagaaagttgattcttcctgtgagtaatgttagagtttaacctattattcttcatattttatatttttgagaaaaataatttagtaattaatagaataataaaatattttattattcaatcctttttaagtatattattattattttttttagtattaagaaatatagttttaagaagtagattaaatataatattaattagttgaattatatttataaaaataggtttatttccttttcatttttgattagtagatgttggtgaaggattaagttgaatgggttttattgtatttttaactttgcaaaaattaattcctttgtatattttaagtttaatagaaatttattatttagaatttattgtagttataaataatttaataggggtagttataatatataatcaaaattctttacgaaaagtattggtttattcaagaatagttcatttaacttgaattattatacttttaaatttaaatagaagatattgatttatttatttttttatttatttaattaatattatgatattaaaaatagtgataaaaaatatagaagtaaataattttattcaattaaagtatttaccaattggaataaagataggattaatgataatttttttaagtttaagtggaatacctccctttataggatttatttctaagataactgttttgttgatgtattttgagaatcaaaaaataatttttttaattatattattagtatctgtaataagaatatatatttatataaattattttatgaagagtttattttttataagattaggttataataaaaataaaaatataggaataagaagaagaattatattattagtattacctttttttatttttttgtatagaattatctaa

SEQ ID NO: 311552 - DNA, 434 bp, Artificial sequence
  CP from IAPV
tatatccagtctaagtgtcggttttcggtctaaactgaaattttgtgaaaaatttagactatagccatacatagggagatttgtctgtctcccagtgcacatctagggggctacggagcgtgattcgccttgtagctggggtggacctatcatccaaccaaaggtaaagtcatcgtttcctgctctggcaacaatttgagttgttgctgtatttgaaaaatacattagagaggaatcataacctttatccgatgttgaagcgataggtattttcctatactgagaatagaatggaacttctacttcatgcacaggattgattacggggtatgttatatgtgaaggtccgtctacgttaatttcatcagctgagtaattacgtggtataagaaagcttcttatatagcatgtttgagattgttgtagaggggtgg

SEQ ID NO: 311553 - DNA, 1633 bp, Artificial sequence
  CP-silencing inverted-repeat construct
ctatccttcgcaagacccttcctctatataaggaagttcatttcatttggagaggacacgctcgagtaatacgactcactatagggcgaccacccctctacaacaatctcaaacatgctatataagaagctttcttataccacgtaattactcagctgatgaaattaacgtagacggaccttcacatataacataccccgtaatcaatcctgtgcatgaagtagaagttccattctattctcagtataggaaaatacctatcgcttcaacatcggataaaggttatgattcctctctaatgtatttttcaaatacagcaacaactcaaattgttgccagagcaggaaacgatgactttacctttggttggatgataggtccaccccagctacaaggcgaatcacgctccgtagccccctagatgtgcactgggagacagacaaatctccctatgtatggctatagtctaaatttttcacaaaatttcagtttagaccgaaaaccgacacttagactggatatagaattcggtacccctgatcagcactgctgccaagaatgtaagtttttatttcttttatatgttcaaacagttttataaagtactataagctttttttagccaaaagaaatatcttaagttttagtaaccaataaagaattattgcggcctccttatttaattatagtacatatgtcatagtagatgttttttttattattattattttttatttttttatagttttttacaaattcgacttggagaccttatgatttggaagatactccatttaattttatgagttgtgtttgaaaacatattttaagactaaacacgtagagaacattcttaacaaatttgtaaataaataaatttaactctattctctaggatttaaatattataggtatatatataattttctaataagtttatatcgagtcactcatacgagttgtgtagaaagttaatcacgggtaccaattttaaattaaaaataagaataattatatgatcttaaatttatacaactctgataaaagattgggctttgacatctttgaagaaaactagatttagtaatattctgattaaattgggttcacactttgtagtgggcacactttccgggttcgaaatcgataagcttggatcctatatccagtctaagtgtcggttttcggtctaaactgaaattttgtgaaaaatttagactatagccatacatagggagatttgtctgtctcccagtgcacatctagggggctacggagcgtgattcgccttgtagctggggtggacctatcatccaaccaaaggtaaagtcatcgtttcctgctctggcaacaatttgagttgttgctgtatttgaaaaatacattagagaggaatcataacctttatccgatgttgaagcgataggtattttcctatactgagaatagaatggaacttctacttcatgcacaggattgattacggggtatgttatatgtgaaggtccgtctacgttaatttcatcagctgagtaattacgtggtataagaaagcttcttatatagcatgtttgagattgttgtagaggggtggtctagagtcctgctttaatgagatatgcgagacgcctat
